(19) United States
(12) Patent Application Publication
(10) Pub. No.: US 2022/0354888 A1
(43) Pub. Date: Nov. 10, 2022

(54) ANTISENSE OLIGONUCLEOTIDES (ASOs) DESIGNED TO INHIBIT IMMUNE CHECKPOINT PROTEINS

(71) Applicant: Aalborg Universitet, Aalborg Øst (DK)

(72) Inventors: Sakari Kauppinen, Holte (DK); Andreas Petri, Frederiksberg C (DK); Charlotte Albæk Thrue, Carcavelos (PT)

(21) Appl. No.: 16/322,000

(22) PCT Filed: Aug. 3, 2017
(86) PCT No.: PCT/EP2017/069725

§ 371 Date: Jan. 30, 2019

(30) Foreign Application Priority Data
Aug. 3, 2016 (DK) PA201670576
May 4, 2017 (DK) PA201770309

(51) Int. Cl. A61K 35/17; C12N 5/0783; C12N 15/113; A61P 35/00

(52) U.S. Cl. CPC A61K 35/17; C12N 5/0636; C12N 15/1138; A61P 35/00; C12N 2310/11; C12N 2310/341; C12N 2310/315; C12N 2320/30

(57) ABSTRACT

The present invention provides antisense oligonucleotides directed against immune checkpoints and methods and compositions of using such antisense oligonucleotides for the treatment of cancer.

### FIELD OF THE INVENTION

[0001] The present invention relates to compounds and compositions capable of modulating the expression of immune checkpoint proteins in patients or in immune cells ex vivo. In particular, the invention provides antisense oligonucleotide compounds capable of modulating the expression at least one immune checkpoint protein in a patient or in isolated immune cells ex vivo.

### BACKGROUND

[0002] Recognition and elimination of cancer cells by the host immune system requires a series of events coordinated by cells of the innate and adaptive immune systems. However, most tumors evade the host immune system by co-opting immune checkpoint pathways, such as the cytotoxic T-lymphocyte-associated protein 4 (CTLA-4) and Programmed Death 1 (PD-1) pathways, respectively, as a key mechanism of immune resistance, especially against T cells that are specific for tumor antigens (Pardoll 2012, Nat Rev Cancer 12:252-264; Topalian et al. 2015, Cancer Cell 27: 450-461). CTLA-4 is upregulated on naïve T cells by antigenic stimulus, and controls the function of regulatory T cells and the establishment of peripheral T cell tolerance. The PD-1 pathway is important for chronic antigenic stimulation of T cells. The engagement of checkpoint receptors on the surface of T cells by their cognate ligands (B7-1 and B7-2 ligands for CTLA-4, PD-L1 and PD-L2 ligands for PD-1) leads to downregulation of T cell function. Binding of PD-L1 and PD-L2 to PD-1 results in decreased T cell proliferation, cytotoxicity, and cytokine production, and increased susceptibility to apoptosis. This plays an important role in the generation and maintenance of peripheral tolerance (Pardoll 2012, Nat Rev Cancer 12:252-64; Topalian et al. 2015, Cancer Cell 27:450-61).

[0003] Monoclonal antibodies directed against the receptors or ligands of the immune checkpoint pathways can reverse tumor-induced downregulation of T cell function and unleash antitumor immune activity, leading to tumor regression (Mahoney et al. 2015, Nat Rev Drug Dis 14:561-84; Topalian et al. 2015, Cancer Cell 27: 450-61; Hoos 2016, Nat Rev Drug Dis 15:235-47). The clinical development of drugs that interrupt immune checkpoints has been pioneered by the monoclonal antibody ipilimumab, which blocks CTLA-4 and is now approved for treatment of advanced melanoma on the basis of its survival benefit (Hodi et al. 2010, N Engl J Med 363: 711-23; Robert et al. 2011, N Engl J Med 364:2517-26). Subsequent clinical trials with monoclonal antibodies blocking PD-1 and its ligand PD-L1 have demonstrated good response rates, sustained clinical benefits with encouraging survival rates and good tolerability across many cancer types, most notably advanced non-small cell lung cancer (Topalian et al. 2012, N Engl J Med 366:2443-64; Robert et al. 2015, N Engl J Med 372:2521-32; Hoos 2016, Nat Rev Drug Dis 15:235-47). However, the clinical benefit of these drugs as single agents has been limited to subsets of patients and has not been observed in all tumor types (Mahoney et al. 2015, Nat Rev Drug Dis 14:561-84; Topalian et al. 2015, Cancer Cell 27: 450-61; Hoos 2016, Nat Rev Drug Dis 15:235-47). These limitations call for the development of new therapeutic approaches directed against the expanding inventory of immune checkpoints and new combination therapies, which collectively aim at extending the therapeutic benefits of immune checkpoint blockade to reach a larger proportion of cancer patients.

### Sequence Listing

[0004] The present application is being filed along with a sequence listing in electronic format, and is provided as a file named seqListing_ST25_win.txt created on Aug. 2, 2017, which is 1.07 MB (bytes) in size. The disclosure in the electronic format of the sequence listing is incorporated herein by reference in its entirety.

### SUMMARY OF THE INVENTION

[0005] The present invention provides novel antisense oligonucleotides directed against immune checkpoints and methods and compositions of using such antisense oligonucleotides for the treatment of cancer.

### BRIEF DESCRIPTION OF THE DRAWINGS

[0006] FIG. 1 shows knockdown of CTLA-4 mRNA in the chronic myelogenous leukemia cell line K562 after unassisted uptake of CTLA-4 antisense oligonucleotides CRM0095 and CRM0096, as compared to scrambled control oligo CRM0023 and mock transfection. 1, 0.25 and 0.1 μM of the oligonucleotides were tested.

[0007] FIG. 2 shows knockdown of PDCD1 mRNA in the chronic myelogenous leukemia cell line K562 after unassisted uptake of PDCD1 antisense oligonucleotides CRM0097 and CRM0098, as compared to scrambled control oligo CRM0023 and mock transfection. 1, 0.25 and 0.1 μM of the oligonucleotides were tested.

[0008] FIG. 3 shows knockdown of CTLA-4 mRNA in the chronic myelogenous leukemia cell line K562 after unassisted uptake of CTLA-4 antisense oligonucleotides CRM0095 and CRM0096, as compared to scrambled control oligo CRM0023 and mock transfection. 2.5 and 0.5 μM of the oligonucleotides were tested.

[0009] FIG. 4 shows knockdown of PDCD1 mRNA in the chronic myelogenous leukemia cell line K562 after unassisted uptake of PDCD1 antisense oligonucleotides CRM0097 and CRM0098, as compared to scrambled control oligo CRM0023 and mock transfection. 2.5 and 0.5 μM of the oligonucleotides were tested.

[0010] FIG. 5 shows knockdown of PDL1, IDO1, and PDL2 mRNA in GMS-10 cells after lipofectamine-assisted uptake with antisense oligonucleotide CRM0193 targeting both PDL1 and IDO1, or antisense oligonucleotide CRM0196 targeting both PDL1 and PDL2, or antisense oligonucleotide CRM0198 targeting both IDO1 and PDL2, as compared with Scrambled oligonucleotide control CRM0023 and mock transfection. Antisense oligonucleotide concentration was 25 nM and incubation time 24 hours.

[0011] FIG. 6A shows PDL1 protein downregulation in GMS-10 cells after lipofectamine-assisted uptake of antisense oligonucleotide CRM0193 targeting both PDL1 and IDO1, or antisense oligonucleotide CRM0196 targeting both PDL1 and PDL2, or antisense oligonucleotide CRM0198 targeting both IDO1 and PDL2, as compared with mock transfection. Antisense oligonucleotide concentration was 25 nM and incubation time 48 hours.

[0012] FIG. 6B shows PDL1 protein downregulation in GMS-10 after lipofectamine-assisted uptake of antisense oligonucleotide CRM0185 targeting PDL1, or antisense oligonucleotide CRM0187 targeting IDO1, or antisense oligonucleotide CRM0190 targeting PDL2, as compared with mock transfection. Antisense oligonucleotide concentration was 25 nM and incubation time 48 hours.

[0013] FIG. 7 shows knockdown of PDL1, IDO1, and PDL2 mRNA in GMS-10 cells after lipofectamine-assisted uptake of antisense oligonucleotide CRM0185, targeting PDL1, or antisense oligonucleotide CRM0187 targeting IDO1, or antisense oligonucleotide CRM0190 targeting PDL2 as compared with Scrambled oligonucleotide CRM0023 and mock transfection. Antisense oligonucleotide concentration was 25 nM and incubation time 24 hours.

[0014] FIG. 8 shows IDO1 protein downregulation in GMS-10 cells after lipofectamine-assisted uptake of antisense oligonucleotide CRM0187 targeting IDO1.

[0015] FIG. 9 shows knockdown of PDL1, PDL2, and IDO1 after unassisted delivery of antisense oligonucleotide CRM0185 targeting PDL1, or antisense oligonucleotide CRM0187 targeting IDO1, or antisense oligonucleotide CRM0190 targeting PDL2 into GMS-10 cells . Following knockdown with each antisense oligonucleotide, the expression levels of PDL1, IDO1, and PDL2, respectively, were assessed with qPCR (PDL1=1^{st}, IDO1=2^{nd}, and PDL2=3^{rd} bar in each triplet of bars).

[0016] FIG. 10 shows IDO1 protein downregulation in GMS-10 cells after unassisted uptake of antisense oligonucleotide CRM0187 targeting IDO1.

[0017] FIG. 11 shows IDO1 protein downregulation in GMS-10 cells after lipofectamine-assisted uptake of antisense oligonucleotide CRM0193 targeting both PDL1 and IDO1, or antisense oligonucleotide CRM0198 targeting both IDO1 and PDL2.

[0018] FIG. 12 shows knockdown of PDL1, PDL2, and IDO1 mRNA in GMS-10 cells after lipofectamine-assisted uptake of antisense oligonucleotides CRM0129 or CRM0131, targeting both human and mouse PDL1, or antisense oligonucleotides CRM0134 or CRM0135 targeting both human and mouse IDO1, or antisense oligonucleotides CRM0138 and CRM0139 targeting both human and mouse PDL2 as compared with scrambled oligonucleotide CRM0023 and mock transfection. The expression levels of PDL1, IDO1, and PDL2 were assessed with qPCR (PDL1=1^{st}, IDO1=2^{nd}, and PDL2=3^{rd} bar in each triplet of bars).

[0019] FIG. 13 shows knockdown of PDL1 mRNA in murine Neuro-2a cells after lipofectamine-assisted uptake of antisense oligonucleotides CRM0129 or CRM0131, targeting both human and mouse PDL1.

[0020] FIG. 14 shows downregulation of IDO1 protein levels in GMS-10 cells after lipofectamine-assisted uptake of antisense oligonucleotides CRM0129 or CRM0131, targeting both human and mouse PDL1, or antisense oligonucleotides CRM0134 or CRM0135 targeting both human and mouse IDO1, or antisense oligonucleotide CRM0138 targeting both human and mouse PDL2 as compared with scrambled oligonucleotide CRM0023 and mock transfection.

### DETAILED DESCRIPTION OF THE INVENTION

### Terms and Definitions

[0021] In describing the embodiments of the invention specific terminology will be resorted to for the sake of clarity. However, the invention is not intended to be limited to the specific terms so selected, and it is understood that each specific term includes all technical equivalents, which operate in a similar manner to accomplish a similar purpose.

[0022] The term “therapeutically effective amount”, or “effective amount” or effective dose”, refers to an amount of a therapeutic agent, which confers a desired therapeutic effect on an individual in need of the agent. The effective amount may vary among individuals depending on the health and physical condition of the individual to be treated, the taxonomic group of the individuals to be treated, the formulation of the composition, the method of administration, assessment of the individual's medical condition, and other relevant factors.

[0023] The term “treatment” refers to any administration of a therapeutic medicament, herein comprising an antisense oligonucleotide that partially or completely cures or reduces one or more symptoms or features of a given disease.

[0024] The term “compound” as used herein, refers to a compound comprising an oligonucleotide according to the invention. In some embodiments, a compound may comprise other elements a part from the oligonucleotide of the invention. Such other elements may in non-limiting example be a delivery vehicle which is conjugated or in other way bound to the oligonucleotide.

[0025] “Antisense oligonucleotide” means a single-stranded oligonucleotide having a nucleobase sequence that permits hybridization to a corresponding region or segment of a target nucleic acid. The antisense oligonucleotide of the present invention is preferably a gapmer.

[0026] A “gapmer” is a chimeric antisense compound, in which an internal region having a plurality of nucleosides (such as a region of at least 6 or 7 DNA nucleotides), which is capable of recruiting an RNAse, such as RNAseH, which region is positioned between external wings at each end, having one or more nucleosides, wherein the nucleosides comprising the internal region are chemically distinct from the nucleoside or nucleosides comprising the external wings.

[0027] The internal region of a gapmer may be referred to as the “gap”.

[0028] The external regions of a gapmer may be referred to as the “wings”.

[0029] “Nucleoside analogues” are described by e.g. Freier & Altmann; Nucl. Acid. Res., 1997, 25, 4429-4443 and Uhlmann; Curr. Opinion in Drug Development, 2000, 3(2), 293-213, and examples of suitable and preferred nucleoside analogues are provided by WO2007031091, which are hereby incorporated by reference.

[0030] “5-methylcytosine” means a cytosine modified with a methyl group attached to the 5′ position. A 5-methylcytosine is a modified nucleobase.

[0031] “2′-O-methoxyethyl” (also 2′-MOE and 2′-O(CH˜)˜—OCH3) refers to an O-methoxy-ethyl modification at the 2′ position of a furanose ring.

[0032] “2′-MOE nucleoside” (also 2′-O-methoxyethyl nucleoside) means a nucleoside comprising a 2′-MOE modified sugar moiety.

[0033] A “locked nucleic acid” or “LNA” is often referred to as inaccessible RNA, and is a modified RNA nucleobase. The ribose moiety of an LNA nucleobase is modified with an extra bridge connecting the 2′ oxygen and 4′ carbon. An LNA oligonucleotide offers substantially increased affinity for its complementary strand, compared to traditional DNA or RNA oligonucleotides. In some aspects bicyclic nucleoside analogues are LNA nucleotides, and these terms may therefore be used interchangeably, and in such embodiments, both are characterized by the presence of a linker group (such as a bridge) between C2′ and C4′ of the ribose sugar ring. When used in the present context, the terms “LNA unit”, “LNA monomer”, “LNA residue”, “locked nucleic acid unit”, “locked nucleic acid monomer” or “locked nucleic acid residue”, refer to a bicyclic nucleoside analogue. LNA units are described in inter alia WO 99/14226, WO 00/56746, WO 00/56748, WO 01/25248, WO 02/28875, WO 03/006475, WO2015071388, and WO 03/095467.

[0034] “Beta-D-Oxy LNA”, is a preferred LNA variant.

[0035] “Bicyclic nucleic acid” or “BNA” or “BNA nucleosides” mean nucleic acid monomers having a bridge connecting two carbon atoms between the 4′ and 2′ position of the nucleoside sugar unit, thereby forming a bicyclic sugar. Examples of such bicyclic sugar include, but are not limited to A) pt-L-methyleneoxy (4′-CH2-0-2′) LNA, (B) P-D-Methyleneoxy (4′-CH2-0-2′) LNA, (C) Ethyleneoxy (4′-(CH2)2-0-2′) LNA, (D) Aminooxy (4′-CH2-0-N(R)-2′) LNA and (E) Oxyamino (4′-CH2-N(R)-0-2′) LNA.

[0036] As used herein, LNA compounds include, but are not limited to, compounds having at least one bridge between the 4′ and the 2′ position of the sugar wherein each of the bridges independently comprises 1 or from 2 to 4 linked groups independently selected from —[C(R˜)(R2)],—, —C(R˜)═C(R2)-, —C(R˜)═N, —C(═NREM)-, —C(=0)-, —C(═S)—, -0-, —Si(Ri)q-, —S(=0)- and —N(R&)-; wherein: x is 0, 1, or 2; n is 1, 2, 3, or 4; each R& and R2 is, independently, H, a protecting group, hydroxyl, C»C» alkyl, substituted C» (—CHz-) group connecting the 2′ oxygen atom and the 4′ carbon atom, for which the term methyleneoxy (4′-CH&-0-2′) LNA is used.

[0037] Furthermore; in the case of the bicyclic sugar moiety having an ethylene bridging group in this position, the ethyleneoxy (4′-CH&CH&-0-2′) LNA is used. n -L-methyleneoxy (4′-CH&-0-2′), an isomer of methyleneoxy (4′-CH&-0-2′) LNA is also encompassed within the definition of LNA, as used herein.

[0038] In some embodiments, the nucleoside unit is an LNA unit selected from the list of beta-D-oxy-LNA, alpha-Loxy-LNA, beta-D-amino-LNA, alpha-L-amino-LNA, beta-D-thio-LNA, alpha-L-thio-LNA, 5′-methyl-LNA, beta-D-ENA and alpha-L-ENA.

[0039] “cEt” or “constrained ethyl” means a bicyclic sugar moiety comprising a bridge connecting the 4′-carbon and the 2′-carbon, wherein the bridge has the formula: 4′-CH(CHq)-0-2′.

[0040] “Constrained ethyl nucleoside” (also cEt nucleoside) means a nucleoside comprising a bicyclic sugar moiety comprising a 4′-CH(CH3)-0-2′ bridge. cEt and some of its properties are described in Pallan et al. Chem Commun (Camb). 2012, Aug. 25; 48(66): 8195-8197.

[0041] “Tricyclo (tc)-DNA” belongs to the class of conformationally constrained DNA analogs that show enhanced binding properties to DNA and RNA. Structure and method of production may be seen in Renneberg et al. Nucleic Acids Res. 2002 Jul. 1; 30(13): 2751-2757.

[0042] “2′-fluoro”, as referred to herein is a nucleoside comprising a fluoro group at the 2′ position of the sugar ring. 2′-fluorinated nucleotides are described in Peng et al. J Fluor Chem. 2008 September; 129(9): 743-766.

[0043] “2′-O-methyl”, as referred to herein, is a nucleoside comprising a sugar comprising an —OCH3 group at the 2′ position of the sugar ring.

[0044] “Conformationally Restricted Nucleosides (CRN)” and methods for their synthesis, as referred to herein, are described in WO2013036868, which is hereby incorporated by reference. CRN are sugar-modified nucleosides, in which, similar to LNA, a chemical bridge connects the C2′ and C4′ carbons of the ribose. However, in a CRN, the C2′-C4′ bridge is one carbon longer than in an LNA molecule. The chemical bridge in the ribose of a CRN locks the ribose in a fixed position, which in turn restricts the flexibility of the nucleobase and phosphate group. CRN substitution within an RNA- or DNA-based oligonucleotide has the advantages of increased hybridization affinity and enhanced resistance to nuclease degradation.

[0045] “Unlocked Nucleic Acid” or “UNA”, is as referred to herein unlocked nucleic acid typically where the C2-C3 C-C bond of the ribose has been removed, forming an unlocked “sugar” residue (see Fluiter et al., Mol. Biosyst., 2009, 10, 1039, hereby incorporated by reference, and Snead et al. Molecular Therapy—Nucleic Acids (2013) 2, e103;).

[0046] “Cancer” is also known as malignant neoplasm, which is a term for diseases, in which abnormal cells divide without control, and can invade nearby tissues or spread to other parts of the body.

[0047] “Hepatocellular carcinoma” (HCC) is the most common type of liver cancer. Carcinoma means that it is a cancer found in tissues that cover or line the surfaces of the liver. This is the most common liver cancer type. Internucleoside linkages are in preferred embodiments phosphorothioate linkages, however, it is recognized that the inclusion of phosphodiester linkages, such as one or two linkages, into an otherwise phosphorothioate oligonucleotide, particularly between or adjacent to nucleotide analogue units can modify the bioavailability and/or bio-distribution of an oligonucleotide as described in WO2008/053314, hereby incorporated by reference. In some embodiments, where suitable and not specifically indicated, all remaining linkage groups are either phosphodiester or phosphorothioate, or a mixture thereof.

[0048] The term “ex vivo treatment of cells” with oligonucleotides, includes administration to the cells ex vivo of an oligonucleotide capable of targeting and inhibiting the expression of immune checkpoint proteins on antigen presenting cells (APC) or on T cells (ligands). This provides the opportunity to selectively affect expression of a gene in a desired target cell. Well known transfection methods such as lipid based or vector (e.g. viral) based may be used to facilitate uptake of the oligonucleotides in the cells ex vivo.

[0049] The term “unassisted uptake” refers to a transfection method, in which antisense oligonucleotides are delivered to cells essentially as described in Soifer et al. (Methods Mol Biol. 2012; 815: 333-46).

[0050] The term “GalNAc” or “GalNAc Conjugate” moieties as referred to herein are galactose derivatives, preferably an N-acetylgalactosamine (GalNAc) conjugate moiety. More preferably a trivalent N-acetylgalactosamine moiety is used. GalNAc conjugation of antisense oligonucleotides is known previously as described in WO2015071388. Targeting to hepatocytes in the liver can be greatly enhanced by the addition of a conjugate moiety.

[0051] “Target region” means a portion of a target nucleic acid to which one or more antisense compounds is targeted.

[0052] “Targeted delivery” as used herein means delivery, wherein the antisense oligonucleotide has either been formulated in a way that will facilitate efficient delivery in specific tissues or cells, or wherein the antisense oligonucleotide in other ways has been for example modified to comprise a targeting moiety, or in other way has been modified in order to facilitate uptake in specific target cells.

[0053] The term “Immune Checkpoint Protein” as used herein, refers to certain molecules expressed either by T-cells (receptors) of the immune system, or by antigen presenting cells (APC) in the body (ligands). Immune Checkpoint Proteins are used by the T-cells to identify if a cell is normal and healthy or infected or cancerous. Cancer cells often use expression of Immune Checkpoint Proteins to evade an immune response against them. Use of antibodies to inhibit the interaction between the Immune Checkpoint Protein receptor on T-cells and its ligand on antigen presenting cells or tumor cells has proved effective in cancer treatment.

[0054] The antisense oligonucleotides of the invention are designed to target immune checkpoint proteins on antigen presenting cells (APC), tumor cells or on T cells:

[0055] Specific antisense oligonucleotides have been designed to target regions of the mRNA coding for the following Immune Checkpoint Proteins on APC or tumor cells:

[0056] “CD274”, which is also sometimes termed “PDL1”, and as used herein has Ensembl gene id: ENSG00000120217 and Ensembl transcript id: ENST00000381577. The mouse version of CD274 is termed “Cd274”, and has Ensembl gene id (mouse): ENSMUSG00000016496, and Ensembl transcript id: ENSMUST00000016640.

[0057] “PDCD1LG2”, which is also sometimes termed “PDL2”, and as used herein has Ensembl gene id: ENSG00000197646 and Ensembl transcript id: ENST00000397747. The mouse version of PDCD1LG2 is termed “Pdcd1lg2”, and has Ensembl gene id (mouse): ENSMUSG00000016498, and Ensembl transcript id: ENSMUST00000112576.

[0058] “CD80”, as used herein has Ensembl gene id: ENSG00000121594 and Ensembl transcript id: ENST00000264246. The mouse version of CD80 is termed “Cd80”, and has Ensembl gene id (mouse): ENSMUSG00000075122, and Ensembl transcript id: ENSMUST00000099816.

[0059] “CD86”, as used herein has Ensembl gene id: ENSG00000114013 and Ensembl transcript id: ENST00000330540. The mouse version of CD86 is termed “Cd86”, and has Ensembl gene id (mouse): ENSMUSG00000022901, and Ensembl transcript id: ENSMUST00000089620.

[0060] “CD276” which is also sometimes termed “B7-H3”, and as used herein has Ensembl gene id: ENSG00000103855 and Ensembl transcript id: ENST00000318443. The mouse version of CD276 is termed “Cd276”, and has Ensembl gene id (mouse): ENSMUSG00000035914, and Ensembl transcript id: ENSMUST00000165365.

[0061] “VTCN1” which is also sometimes termed “B7-H4”, and as used herein has Ensembl gene id: ENSG00000134258 and Ensembl transcript id: ENST00000369458. The mouse version of VTCN1 is termed “Vtcn1”, and has Ensembl gene id (mouse): ENSMUSG00000051076, and Ensembl transcript id: ENSMUST00000054791.

[0062] “TNFRSF14” which is also sometimes termed “HVEM”, and as used herein has Ensembl gene id: ENSG00000157873 and Ensembl transcript id: ENST00000355716. The mouse version of TNFRSF14 is termed “Tnfrsf14”, and has Ensembl gene id (mouse): ENSMUSG00000042333, and Ensembl transcript id: ENSMUST00000123514.

[0063] “LGALS9” which is also sometimes termed “GAL9”, and as used herein has Ensembl gene id: ENSG00000168961 and Ensembl transcript id: ENST00000395473. The mouse version of LGALS9 is termed “Lgals9”, and has Ensembl gene id (mouse): ENSMUSG00000001123, and Ensembl transcript id: ENSMUST00000108268.

[0064] “IDO1”, as used herein has Ensembl gene id: ENSG00000131203 and Ensembl transcript id: ENST00000518237. The mouse version of IDO1 is termed “Ido1”, and has Ensembl gene id (mouse): ENSMUSG00000031551, and Ensembl transcript id: ENSMUST00000033956.

[0065] “HMOX1” which is also sometimes termed “HO1”, and as used herein has Ensembl gene id: ENSG00000100292 and Ensembl transcript id: ENST00000216117. The mouse version of HMOX1 is termed “Hmox1”, and has Ensembl gene id (mouse): ENSMUSG00000005413, and Ensembl transcript id: ENSMUST00000005548.

[0066] Specific oligonucleotides have been designed which target regions of the mRNA coding for the following T cell receptors:

[0067] “PDCD1” which is also sometimes termed “PD1”, and as used herein has Ensembl gene id: ENSG00000188389 and Ensembl transcript id: ENST00000334409. The mouse version of PDCD1 is termed “Pdcd1”, and has Ensembl gene id (mouse): ENSMUSG00000026285, and Ensembl transcript id: ENSMUST00000027507.

[0068] “CTLA4” as used herein has Ensembl gene id: ENSG00000163599 and Ensembl transcript id: ENST00000302823. The mouse version of CTLA4 is termed “Ctla4”, and has Ensembl gene id (mouse): ENSMUSG00000026011, and Ensembl transcript id: ENSMUST00000027164.

[0069] “LAG3” as used herein has Ensembl gene id: ENSG00000089692 and Ensembl transcript id: ENST00000203629. The mouse version of LAG3 is termed “Lag3”, and has Ensembl gene id (mouse): ENSMUSG00000030124, and Ensembl transcript id: ENSMUST00000032217.

[0070] “HAVCR2” as used herein has Ensembl gene id: ENSG00000135077 and Ensembl transcript id: ENST00000307851. The mouse version of HAVCR2 is termed “Havcr2”, and has Ensembl gene id (mouse): ENSMUSG00000020399, and Ensembl transcript id: ENSMUST00000020668.

[0071] “TDO2” as used herein has Ensembl gene id: ENSG00000151790 and Ensembl transcript id: ENST00000536354. The mouse version of TDO2 is termed “Tdo2”, and has Ensembl gene id (mouse): ENSMUSG00000028011, and Ensembl transcript id: ENSMUST00000029645.

[0072] “TIGIT as used herein has Ensembl gene id: ENSG00000181847 and Ensembl transcript id: ENST00000486257. The mouse version of TIGIT is termed “Tigit”, and has Ensembl gene id (mouse): ENSMUSG00000071552, and Ensembl transcript id: ENSMUST00000096065.

[0073] “VSIR” as used herein has Ensembl gene id: ENSG00000107738 and Ensembl transcript id: ENST00000394957. The mouse version of VSIR is termed “Vsir”, and has Ensembl gene id (mouse): ENSMUSG00000020101, and Ensembl transcript id: ENSMUST00000020301.

[0074] “CEACAM1” as used herein has Ensembl gene id: ENSG00000079385 and Ensembl transcript id: ENST00000161559. The mouse version of CEACAM1 is termed “Ceacam1”, and has Ensembl gene id (mouse): ENSMUSG00000074272, and Ensembl transcript id: ENSMUST00000098666.

[0075] “NT5E” as used herein has Ensembl gene id: ENSG00000135318 and Ensembl transcript id: ENST00000257770. The mouse version of NT5E is termed “Nt5e”, and has Ensembl gene id (mouse): ENSMUSG00000032420, and Ensembl transcript id: ENSMUST00000034992.

[0076] “KIR2DL1” as used herein has Ensembl gene id: ENSG00000125498 and Ensembl transcript id: ENST00000336077.

[0077] “KIR2DL3” as used herein has Ensembl gene id: ENSG00000243772 and Ensembl transcript id: ENST00000342376.

[0078] The above reference to Ensembl gene or transcript id's are according to Ensembl release 89.

### Compounds and Compositions

[0079] The present invention relates to chemically-modified antisense oligonucleotides (ASOs) designed to modulate one or more Immune Checkpoint Protein mRNAs, for treatment of human disease, such as cancer or infectious diseases.

[0080] The ASOs of the present invention recruit RNase H activity for degradation of the target mRNA, and optionally comprise phosphorothioate internucleotide linkages, to enhance their pharmacokinetic properties in vivo.

[0081] Suitably, the antisense oligonucleotides of the invention are capable of down-regulating or modulating their targets, i.e. an Immune Checkpoint Protein-encoding mRNA. The invention provides specific antisense oligonucleotides targeting one, two or three immune checkpoint proteins simultaneously. Further, compositions are provided comprising one or more antisense oligonucleotides according to the invention, whereby the composition is capable of targeting from 1 to 10 immune checkpoint protein coding mRNAs.

[0082] If more than one Immune Checkpoint Protein is inhibited by a composition, an additive or synergistic effect may be achieved on the disease. The effect may be symptomatic or may even be curative, i.e. in a cancer patient all cancer cells might be killed.

[0083] Therefore, in some preferred embodiments, the antisense oligonucleotides or compositions of the invention are capable of down-regulating or modulating more than one Immune Checkpoint Protein encoding mRNA in a cell. In some embodiments, the invention provides a composition comprising one or more antisense oligonucleotides according to the invention, wherein the composition is capable of down-regulating or modulating more than one Immune Checkpoint Protein encoding mRNA in a cell. In some embodiments, the invention provides a composition comprising one or more antisense oligonucleotides according to the invention, wherein the composition when administered to a cell in vivo or ex vivo, is capable of down-regulating or modulating one Immune Checkpoint Protein encoding mRNA in the cell. In some embodiments, the invention provides a composition comprising one or more antisense oligonucleotides according to the invention, wherein the composition when administered to a cell is capable of down-regulating or modulating two different Immune Checkpoint Protein encoding mRNAs in the cell. In some embodiments, the invention provides a composition comprising one or more antisense oligonucleotides according to the invention, wherein the composition when administered to a cell in vitro or in vivo, is capable of down-regulating or modulating three different Immune Checkpoint Protein encoding mRNAs in the cell. In some embodiments, the invention provides a composition comprising one or more antisense oligonucleotides according to the invention, wherein the composition when administered to a cell ex vivo or in vivo, is capable of down-regulating or modulating four different Immune Checkpoint Protein encoding mRNAs in the cell. In some embodiments, the invention provides a composition comprising one or more antisense oligonucleotides according to the invention, wherein the composition when administered to a cell ex vivo or in vivo, is capable of down-regulating or modulating five different Immune Checkpoint Protein encoding mRNAs in the cell. In some embodiments, the invention provides a composition comprising one or more antisense oligonucleotides according to the invention, wherein the composition when administered to a cell in vitro or in vivo, is capable of down-regulating or modulating six different Immune Checkpoint Protein encoding mRNAs in the cell. In some embodiments, the invention provides a composition comprising one or more antisense oligonucleotides according to the invention, wherein the composition when administered to a cell ex vivo or in vivo, is capable of down-regulating or modulating seven, eight, nine or ten different Immune Checkpoint Protein mRNAs in the cell.

[0084] In some embodiments, it may be an advantage to target not only the immune checkpoint receptor on T cells, but also its ligand on antigen presenting cells (APC) or tumor cells, to achieve a more efficient treatment of the disease. Therefore, in some preferred embodiments, the invention provides compositions comprising one or more antisense oligonucleotides according to the invention, wherein the composition is capable of targeting both a immune checkpoint receptor and its ligand.

[0085] In order to be able to provide efficient treatment, the present invention provides antisense oligonucleotides consisting of a sequence of 14-22 nucleobases in length that is a gapmer comprising a central region of 6 to 16 consecutive DNA nucleotides flanked in each end by wing regions each comprising 1 to 5 nucleotide analogues, wherein the oligonucleotide is complementary to an mRNA encoding an immune checkpoint protein.

[0086] In order to ensure efficient treatment using the antisense oligonucleotides of the invention, when used in vivo, the stability of the oligonucleotides may be improved by introduction of alternatives to the normal phosphodiester internucleotide bonds. In some embodiments, the antisense oligonucleotides of the invention comprise one or more phosphorothioate internucleotide linkages. In preferred embodiments, the antisense oligonucleotide according to the invention comprises 1 to 21 phosphorothioate internucleotide linkages. Certain immune checkpoint proteins are of particular interest for use in cancer treatment. In some embodiments, the antisense oligonucleotide according to the invention is complementary to a region of the mRNA encoding anyone of the immune checkpoint proteins selected from the list of CD274, PDCD1LG2, CD80, CD86, CD276, VTCN1, TNFRSF14, LGALS9, IDO1, HMOX1, PDCD1, CTLA4, LAG3, HAVCR2, TDO2, TIGIT, VSIR, CEACAM1, NT5E, KIR2DL1, and KIR2DL3. In some embodiments, the antisense oligonucleotides or compositions are capable of downregulating or modulating one or more immune checkpoint proteins. In some instances, an antisense oligonucleotide according to the invention is capable of downregulating or modulating the expression of one, two or three immune checkpoint proteins selected from the list of CD274, PDCD1LG2, CD80, CD86, CD276, VTCN1, TNFRSF14, LGALS9, IDO1, HMOX1, PDCD1, CTLA4, LAG3, HAVCR2, TDO2, TIGIT, VSIR, CEACAM1, NT5E, KIR2DL1, and KIR2DL3. In some instances the compositions comprising antisense oligonucleotides of the invention are capable of downregulating or modulating the expression of one or more immune checkpoint proteins selected from the list of CD274, PDCD1LG2, CD80, CD86, CD276, VTCN1, TNFRSF14, LGALS9, IDO1, HMOX1, PDCD1, CTLA4, LAG3, HAVCR2, TDO2, TIGIT, VSIR, CEACAM1, NT5E, KIR2DL1, and KIR2DL3. Accordingly, in some embodiments, the antisense oligonucleotide according to the invention is complementary to a region of at least one, such as one mRNA selected from the group consisting of an mRNA encoding CD274, an mRNA encoding PDCD1LG2, an mRNA encoding CD80, an mRNA encoding CD86, an mRNA encoding CD276, an mRNA encoding VTCN1, an mRNA encoding TNFRSF14, an mRNA encoding LGALS9, an mRNA encoding IDO1, mRNA encoding HMOX1, an mRNA encoding PDCD1, an mRNA encoding CTLA4, an mRNA encoding LAG3, an mRNA encoding HAVCR2, an mRNA encoding TDO2, an mRNA encoding TIGIT, an mRNA encoding VSIR, an mRNA encoding CEACAM1, an mRNA encoding NT5E, an mRNA encoding KIR2DL1, and an mRNA encoding KIR2DL3.

[0087] In some embodiments, the antisense oligonucleotide of the invention is complementary to a region of at least two, such as two mRNAs selected from the group consisting of an mRNA encoding CD274, an mRNA encoding PDCD1LG2, an mRNA encoding CD80, an mRNA encoding CD86, an mRNA encoding CD276, an mRNA encoding VTCN1, an mRNA encoding TNFRSF14, an mRNA encoding LGALS9, an mRNA encoding IDO1, mRNA encoding HMOX1, an mRNA encoding PDCD1, an mRNA encoding CTLA4, an mRNA encoding LAG3, an mRNA encoding HAVCR2, an mRNA encoding TDO2, an mRNA encoding TIGIT, an mRNA encoding VSIR, an mRNA encoding CEACAM1, an mRNA encoding NT5E, an mRNA encoding KIR2DL1, and an mRNA encoding KIR2DL3.

[0088] In some embodiments, the antisense oligonucleotide according to the invention is complementary to a region of at least three, such as three mRNAs selected from the group consisting of an mRNA encoding CD274, an mRNA encoding PDCD1LG2, an mRNA encoding CD80, an mRNA encoding CD86, an mRNA encoding CD276, an mRNA encoding VTCN1, an mRNA encoding TNFRSF14, an mRNA encoding LGALS9, an mRNA encoding IDO1, mRNA encoding HMOX1, an mRNA encoding PDCD1, an mRNA encoding CTLA4, an mRNA encoding LAG3, an mRNA encoding HAVCR2, an mRNA encoding TDO2, an mRNA encoding TIGIT, an mRNA encoding VSIR, an mRNA encoding CEACAM1, an mRNA encoding NT5E, an mRNA encoding KIR2DL1, and an mRNA encoding KIR2DL3.

[0089] Thus, in some embodiments, the antisense oligonucleotide according to the invention is capable of decreasing expression of at least two immune checkpoint proteins selected from of CD274, PDCD1LG2, CD80, CD86, CD276, VTCN1, TNFRSF14, LGALS9, IDO1, HMOX1, PDCD1, CTLA4, LAG3, HAVCR2, TDO2, TIGIT, VSIR, CEACAM1, NT5E, KIR2DL1, and KIR2DL3. In some embodiments, the antisense oligonucleotide according to the invention is capable of decreasing expression of three immune checkpoint proteins selected CD274, PDCD1LG2, CD80, CD86, CD276, VTCN1, TNFRSF14, LGALS9, IDO1, HMOX1, PDCD1, CTLA4, LAG3, HAVCR2, TDO2, TIGIT, VSIR, CEACAM1, NT5E, KIR2DL1, and KIR2DL3.

[0090] The present invention provides some advantageous target regions in the mRNAs of immune checkpoint proteins CD274, PDCD1LG2, CD80, CD86, CD276, VTCN1, TNFRSF14, LGALS9, IDO1, HMOX1, PDCD1 CTLA4, LAG3, HAVCR2, TDO2, TIGIT, VSIR, CEACAM1, NT5E, KIR2DL1, and KIR2DL3 that are specially preferred, and in some preferred embodiments, the antisense oligonucleotide according to the invention is complementary to anyone of SEQ ID NOs: 1-375, or anyone of SEQ ID NOs: 1473-1503, or anyone of SEQ ID NOs: 1535-1593 or to SEQ ID NO: 1654 or to anyone of SEQ ID NOs: 1655-2001, or to anyone of SEQ ID NOs: 3044-3052, or to anyone of SEQ ID NOs: 3062-3097.

[0091] Furthermore, in preferred embodiments, the antisense oligonucleotide of the invention is a gapmer, wherein at least one of the wing regions comprises at least one nucleoside analogue selected from the list of beta-D-oxy LNA, alpha-L-oxy-LNA, beta-D-amino-LNA, alpha-L-amino-LNA, beta-D-thio-LNA, alpha-L-thio-LNA, 5′-methyl-LNA, beta-D-ENA and alpha-L-ENA.

[0092] In a particularly preferred embodiment, the antisense oligonucleotide of the invention comprises at least one Beta-D-Oxy LNA nucleotide in the wings. In some embodiments, the antisense oligonucleotides of the invention are provided which do not comprise LNA. In such embodiments, the nucleoside analogue may be selected from the group consisting of tricyclo-DNA, 2′-fluoro, 2′-O-methyl, 2′-methoxyethyl (2′-MOE), 2′cyclic ethyl (cET), and Conformationally Restricted Nucleoside (CRN). In some embodiments, the antisense oligonucleotide according to the invention comprises a mixture of nucleoside analogues, so that at least one nucleoside analogue is not LNA. Accordingly, in some embodiments, the antisense oligonucleotide according to the invention is designed so that at least one of the wing regions comprises two or more nucleoside analogues, wherein said nucleotide analogues is a mixture of LNA and at least one nucleoside analogue independently selected from the group consisting of tricyclo-DNA, 2′-fluoro, 2′-O-methyl, 2′-methoxyethyl (2′-MOE), 2′cyclic ethyl (cET), and Conformationally Restricted Nucleoside (CRN).

[0093] In preferred embodiments, the antisense oligonucleotide according to the invention comprises two or more nucleoside analogues which are a mixture of LNA and 2′-fluoro.

[0094] The present invention provides a number of specific preferred LNA antisense oligonucleotides targeting one or more of the immune checkpoint proteins from the list CD274, PDCD1LG2, CD80, CD86, CD276, VTCN1, TNFRSF14, LGALS9, IDO1, HMOX1, PDCD1 CTLA4, LAG3, HAVCR2, TDO2, TIGIT, VSIR, CEACAM1, NT5E, KIR2DL1, and KIR2DL3. These antisense oligonucleotides are any one of SEQ ID NOs: 376-1472, or anyone of SEQ ID NOs: 1504-1534, or anyone of SEQ ID NOs: 1594-1653, or anyone of SEQ ID NOs: 2002-3043, or anyone of SEQ ID NOs: 3053-3061, or anyone of SEQ ID NOs: 3098-3133, and their design, sequence and targets are described in Tables 3.1, 3.2, 5.1, 5.2, 7.1 and 7.2.

[0095] Accordingly, in one preferred embodiment, the antisense oligonucleotide according to the invention is a compound of ID NO:CRM0193 complementary to and capable of decreasing the expression of the immune checkpoint proteins PDL1 and/or IDO.

[0096] In another preferred embodiment the antisense oligonucleotide according to the invention is a compound of ID NO: CRM0296 complementary to and capable of decreasing the expression of the immune checkpoint proteins PDL1 and/or PDL2.

[0097] In another preferred embodiment the antisense oligonucleotide according to the invention is a compound of ID NO: CRM0198 complementary to and capable of decreasing the expression of the immune checkpoint proteins PDL2 and/or IDO.

[0098] Accordingly, in another preferred embodiment the antisense oligonucleotide according to the invention is a compound of ID NO:CRM0185 complementary to and capable of decreasing the expression of the immune checkpoint protein PDL1.

[0099] In another preferred embodiment the antisense oligonucleotide according to the invention is a compound of ID NO:CRM0187 complementary to and capable of decreasing the expression of the immune checkpoint protein IDO. In another preferred embodiment the antisense oligonucleotide according to the invention is a compound of ID NO:CRM0190 complementary to and capable of decreasing the expression of the immune checkpoint protein PDL2.

### Uses of the Antisense Oligonucleotides of the Invention

[0100] The antisense oligonucleotides of the invention may be used for in vivo treatment, as well as for ex vivo treatment approaches, such as in cancer vaccine methods. In some embodiments, the use of the antisense oligonucleotides is for generation of compositions for use in in vivo treatment of disease, such as cancer.

### Use in Ex Vivo Methods for Making Anti-Cancer Vaccines

[0101] Cancer treatment using adoptive cell transfer methods and dendritic cell based anti-cancer vaccines are rapidly being developed. Adoptive cell transfer in some cases involve genetic modifications of T-cells to express receptors that recognize specific tumor-associated antigens, and which also comprise in the receptor construct costimulatory molecules for activation of the T-cell response. The present invention provides novel methods of modifying ex-vivo expanded T-cells to make them useful as anti-cancer treatment. In some embodiments, the antisense oligonucleotides of the invention may be used ex vivo to modify expanded T-cells by knocking down expression of CTLA4 and/or PDCD1 and/or LAG3 and/or HAVCR2 and/or TIGIT and/or CEACAM1 in order to prevent the T-cells from seeing cancer cells as normal cells, and thereby initiate an immune response against the cancer cells.

[0102] In a different approach, the antisense oligonucleotides of the invention may be used to create a novel dendritic cell-based anti-cancer vaccine. T cell responses can be initiated, supported and boosted by dendritic cells. These are “professional” antigen-presenting cells, and can activate T cells upon presentation of a peptide in concordance with co-stimulatory signals, which is dependent on the balance between co-inhibitory and co-stimulatory interactions. PD-L1 (CD274) and PD-L2 (PDCD1LG2) are two of the co-inhibitory ligands that are involved in this process. CD8⁺ T-cells that recognize tumor cells expressing minor histocompatibility antigens (MiHAs) express the receptor (PD1 (PDCD1)) for PD-L1 and PD-L2 after A allogenetic stem cell transplantation. However, the high expression of PD1 in the MiHA-specific CD8⁺ T cells causes a functional inhibition of the T cells due to the interaction between PD1 and its ligands PD-L1 and PD-L2. Thus, the antisense oligonucleotides of the present invention may be used to knock down expression of PDCD1LG1 and/or PDCD1LG2 in isolated and expanded dendritic cells before those are used for the treatment of cancer patients. In some embodiments, the modified dendritic cells are used ex vivo to augment the expansion of MiHA specific CD8⁺ T cells ex vivo. Thus, the present invention provides methods of ex vivo expansion and modulation of T-cells or dendritic cells for use as anti-cancer vaccines. In some embodiments, the antisense oligonucleotides of the invention targeting anyone or both of CTLA4 or PDCD1 are used in ex vivo methods of modifying CTLA4 and/or PDCD1 expression in expanded T-cells for treatment of cancer patients, wherein the modified T-cells are subsequently administered to the cancer patient. In some embodiments, isolated dendritic cells are tested for expression of immune checkpoint proteins selected from the list of CD274, PDCD1LG2, CD80, CD86, CD276, VTCN1, TNFRSF14, LGALS9, IDO1, HMOX1, TDO2, VSIR and NT5E, and subsequently the dendritic cells are modified by antisense oligonucleotides of the invention which are targeted to one or more or all of the immune checkpoint proteins for which the dendritic cells tested positive. When reintroduced into a patient, the modified dendritic cells will be more efficient in inducing a T-cell response against cancer cells than non-modified dendritic cells.

[0103] In some embodiments, the antisense oligonucleotides of the invention are targeted to one or more of the immune checkpoint proteins selected from the list of CD274, PDCD1LG2, CD80, CD86, CD276, VTCN1, TNFRSF14, LGALS9, IDO1, HMOX1, TDO2, VSIR and NT5E, and are for use in treatment of cancer in combination with adoptive cell transfer such as modified T-cells wherein the modified T-cells have been treated to reduce expression of one or more of CTLA4 and PDCD1, and/or LAG3 and/or HAVCR2 and/or TIGIT and/or CEACAM1. In some embodiments, antisense oligonucleotides of the invention targeting one or more immune checkpoint protein mRNAs are used to mitigate immune suppression in methods of treating cancer in combination with dendritic cell-based cancer vaccines. In some such embodiments, the antisense oligonucleotides of the invention targeting one or more immune checkpoint protein mRNAs which are used to mitigate immune suppression in methods of treating cancer in combination with dendritic cell based cancer vaccines, are complementary to an mRNA coding for an immune checkpoint protein selected from the list of CD274, PDCD1LG2, CD80, CD86, CD276, VTCN1, TNFRSF14, LGALS9, IDO1, HMOX1, TDO2, VSIR and NT5E.

[0104] In some embodiments, the invention provides a method where isolated natural killer cells (NK cells) are tested for expression of KIR2DL1 and/or KIR2DL3. The isolated cells may then be treated ex vivo by antisense oligonucleotides of the invention targeting KIR2DL1 and/or KIR2DL3, thereby knocking down expression of KIR2DL1 and/or KIR2DL3. The ex vivo expanded, treated NK cells may then be used in a method of treating cancer by NK cell-based immune therapy.

[0105] In some embodiments, the antisense oligonucleotide, compound or composition according to the invention is complementary to anyone of the target sequences selected from the list of SEQ ID NOs: 1-375, or SEQ ID NOs: 1473-1503 or anyone of SEQ ID NOs: 1535-1593 or to SEQ ID NO: 1654, or to anyone of SEQ ID NOs: 1655-2001, or to anyone of SEQ ID NOs: 3044-3052, or to anyone of SEQ ID NOs: 3062-3097 and is for treatment of a cell ex vivo.

[0106] In some embodiments, the antisense oligonucleotide, compound or composition according to the invention is complementary to anyone of the target sequences selected from the list of SEQ ID NOs: 1-375, or SEQ ID NOs: 1473-1503 or anyone of SEQ ID NOs: 1535-1593 or to SEQ ID NO: 1654, or to anyone of SEQ ID NOs: 1655-2001, or to anyone of SEQ ID NOs: 3044-3052, or to anyone of SEQ ID NOs: 3062-3097 and is for treatment of a cell ex vivo, wherein the oligonucleotide has no more than 1, 2 or 3 mismatches to the target sequence.

[0107] In some embodiments, the antisense oligonucleotide, compound or composition which is for use in the treatment of a T-cell ex vivo, is complementary to anyone of SEQ ID NOs: 200-208, 240-249, 261-267, 363, 366, 372, 373, 375, 1488-1493, 1497, 1552-1553, 1562-1565, 1577-1580, 1584-1585, 1588-1589, 1592-1593, 1654, 1656-58, 1665-67, 1675, 1677-78, 1684-85, 1687-88, 1692, 1694, 1702, 1705, 1708, 1724, 1728-29, 1741, 1743, 1750, 1753, 1756-60, 1762-65, 1767, 1774-75, 1784-90, 1796, 1799-1801, 1804, 1808, 1813, 1819, 1826-27, 1829, 1831-32, 1843, 1857-58, 1860, 1866-67, 1871-76, 1878-79, 1882-84, 1893-94, 1896-99, 1909-11, 1920-22, 1924, 1926, 1931, 1934, 1938, 1942-43, 1950-51, 1956-57, 1964-65, 1968, 1970, 1973-75, 1979-81, 1991-94, 1997-2001, 3044-46, 3050, 3062-68, 3077-79, and 3089-94. In some embodiments, the antisense oligonucleotide, compound or composition which is for use in the treatment of an antigen presenting cell, such as a dendritic cell ex vivo, is complementary to anyone of SEQ ID NOs: 1-375, or anyone of SEQ ID NOs: 1473-1487, 1494-1496, 1498-1503, 1535-1551, 1554-1561, 1566-1576, 1581-1583, 1586-1587, 1590-1591, 1655, 1659-65, 1668-1752, 1754-83, 1787-88, 1791-1825, 1828, 1830-42, 1844-73, 1877-81, 1885-95, 1900-49, 1952-67, 1969-2001, 3047-49, 3051-52, 3080-88, and 3095-97.

[0108] In some embodiments, the antisense oligonucleotide, compound or composition which is for use in the treatment of a NK cell ex vivo, is complementary to anyone of SEQ ID Nos: 1656, 1665-1668, 1699, 1714, 1727, 1730-1731, 1740, 1753, 1784-1786, 1789-1790, 1841, 1868-1869, 1896-1899, 1918, 1927, 1944, 1968, and 3069-3076.

[0109] In some embodiments, the antisense oligonucleotide, compound or composition according to the invention, such as anyone of the oligonucleotides selected from the list of SEQ ID NOs: 376-1472, or anyone of SEQ ID NOs: 1504-1534, or anyone of SEQ ID NOs: 1594-1653, or anyone of SEQ ID NOs: 2002-3043, or anyone of SEQ ID NOs: 3053-3061, or anyone of SEQ ID NOs: 3098-3133 is for treatment of a cell ex vivo.

[0110] In some embodiments, the antisense oligonucleotide, compound or composition according to the invention, such as anyone of the oligonucleotides selected from the list of SEQ ID NOs: 973-999, 1093-1122, 1156-1176, 1460, 1463, 1466, 1469,-1470, 1472, 1519-1524, 1528, 1611-1612, 1621-1624, 1636-1639, 1643-1644, 1647-1648, or 1651-1653, 2005-13, 2032-40, 2062-64, 2068-73, 2089-94, 2098-2103, 2013-15, 2019-21, 2143-45, 2152-54, 2161-63, 2209-11, 2221-26, 2254-56, 2260-68, 2287-89, 2296-98, 2305-19, 2323-34, 2338-40, 2359-64, 2390-2410, 2426-28, 2435-43, 2450-52, 2462-64, 2477-79, 2495-97, 2516-21, 2525-27, 2531-36, 2567-69, 2609-14, 2618-20, 2634-41, 2660-68, 2672-77, 2684-92, 2715-22, 2726-37, 2763-73, 2798-2806, 2816-18, 2831-33, 2840-48, 2852-54, 2864-69, 2930-35, 2948-50, 2957-65, 2975-83, 2942-44, 3011-22, 3029-43, 3053-55, 3059, 3098-3104, 3113-15, and 3125-30, is for treatment of a cell ex vivo wherein the cell is a T-cell.

[0111] In some embodiments, the antisense oligonucleotide, compound or composition according to the invention, such as anyone of the oligonucleotides selected from the list of SEQ ID NOs: 376-1472, or anyone of SEQ ID NOs: 1504-1518, 1525-1527, 1529-1534, 1594-1610, 1613-1620, 1625-1635, 1640-1642, 1645-1646, 1649-1650, 2002-04, 2014-34, 2039-2295, 2299-2389, 2399-2404, 2411-2515, 2522-24, 2528-66, 2570-2665, 2669-81, 2693-2725, 2736-2941, 2945-3043, 3056-58, 3060-61, 3116-24, and 3131-33 is for treatment of a cell ex vivo wherein the cell is an antigen presenting cell, such as a dendritic cell.

[0112] In some embodiments, the antisense oligonucleotide, compound or composition according to the invention, such as anyone of the oligonucleotides selected from the list of SEQ ID NOs: 2005-13, 2032-40, 2134-36, 2179-81, 2218-20, 2227-32, 2251-53, 2257-59, 2296-98, 2390-98, 2405-10, 2561-63, 2642-47, 2726-37, 2792-94, 2819-21, 2870-72, 2942-44, 3105-12 is for treatment of a cell ex vivo, wherein the cell is a NK cell.

[0113] In some embodiments, the antisense oligonucleotides of the invention are used for treatment of cancer in combination with a cancer vaccine. In some embodiments, the compounds, antisense oligonucleotides, compositions, ex vivo modified cells, and methods of treatment of the invention are for use in the treatment of cancer. In some such embodiments, the cancer is selected from the list of anyone of a cancer including solid tumors such as skin, breast, brain, cervical carcinomas, testicular carcinomas, etc. More particularly, cancers that may be treated by the compounds, compositions and methods of the invention include, but are not limited to: Cardiac: sarcoma (angiosarcoma, fibrosarcoma, rhabdomyosarcoma, liposarcoma), myxoma, rhabdomyoma, fibroma, lipoma and teratoma; Lung: bronchogenic carcinoma (squamous cell, undifferentiated small cell, undifferentiated large cell, adenocarcinoma), alveolar (bronchiolar) carcinoma, bronchial adenoma, sarcoma, lymphoma, chondromatous hamartoma, mesothelioma; Gastrointestinal: esophagus (squamous cell carcinoma, adenocarcinoma, leiomyosarcoma, lymphoma), stomach (carcinoma, lymphoma, leiomyosarcoma), pancreas (ductal adenocarcinoma, insulinoma, glucagonoma, gastrinoma, carcinoid tumors, vipoma), small bowel (adenocarcinoma, lymphoma, carcinoid tumors, Karposi's sarcoma, leiomyoma, hemangioma, lipoma, neurofibroma, fibroma), large bowel (adenocarcinoma, tubular adenoma, villous adenoma, hamartoma, leiomyoma); Genitourinary tract: kidney (adenocarcinoma, Wilm's tumor [nephroblastoma], lymphoma, leukemia), bladder and urethra (squamous cell carcinoma, transitional cell carcinoma, adenocarcinoma), prostate (adenocarcinoma, sarcoma), testis (seminoma, teratoma, embryonal carcinoma, teratocarcinoma, choriocarcinoma, sarcoma, interstitial cell carcinoma, fibroma, fibroadenoma, adenomatoid tumors, lipoma); Liver: hepatoma (hepatocellular carcinoma), cholangiocarcinoma, hepatoblastoma, angiosarcoma, hepatocellular adenoma, hemangioma; Bone: osteogenic sarcoma (osteosarcoma), fibrosarcoma, malignant fibrous histiocytoma, chondrosarcoma, Ewing's sarcoma, malignant lymphoma (reticulum cell sarcoma), multiple mycloma, malignant giant cell tumor chordoma, osteochronfroma (osteocartilaginous exostoses), benign chondroma, chondroblastoma, chondromyxofibroma, osteoid osteoma and giant cell tumors; Nervous system: skull (osteoma, hemangioma, granuloma, xanihoma, osteitis deformans), meninges (meningioma, meningiosarcoma, gliomatosis), brain (astrocytoma, medulloblastoma, glioma, ependymoma, germinoma [pinealoma], glioblastoma multiform, oligodendroglioma, schwannoma, retinoblastoma, congenital tumors), spinal cord neurofibroma, meningioma, glioma, sarcoma); Gynecological: uterus (endometrial carcinoma), cervix (cervical carcinoma, pre-tumor cervical dysplasia), ovaries (ovarian carcinoma [serous cystadenocarcinoma, mucinous cystadenocarcinoma, unclassified carcinoma], granulosa-thecal cell tumors, Sertoli-Leydig cell tumors, dysgerininoma, malignant teratoma), vulva (squamous cell carcinoma, intraepithelial carcinoma, adenocarcinoma, fibrosarcoina, melanoma), vagina (clear cell carcinoma, squamous cell carcinoma, botryoid sarcoma (embryonal rhabdomyosarcoma), fallopian tubes (carcinoma); Hematologic: blood (myeloid leukemia [acute and chronic], acute lymphoblastic leukemia, chronic lymphocytic leukemia, myeloproliferative diseases, multiple myeloma, myelodysplastic syndrome), Hodgkin's disease, non-Hodgkin's lymphoma [malignant lymphoma]; Skin: malignant melanoma, basal cell carcinoma, squamous cell carcinoma, Karposi's sarcoma, moles dysplastic nevi, lipoma, angioma, dermatofibroma, keloids, psoriasis; and Adrenal glands: neuroblastoma.

[0114] Isolation and expansion of T-cells, such as MiHA specific CD8⁺ T cells, and dendritic cells are well known in the art (for example see van der Waart et al. (2015) Cancer Immunol Immunother 64:645-654).

### Modulation of Immune Checkpoint Proteins in Methods of Treatment.

[0115] The present invention relates to chemically-modified antisense oligonucleotides (ASOs) designed to modulate one or more Immune Checkpoint Protein encoding mRNAs, for treatment of human disease, such as cancer.

[0116] The ASOs of the present invention recruit RNase H activity for degradation of the target mRNA, and comprise phosphorothioate internucleotide linkages, to enhance their pharmacokinetic properties in vivo. These features make the ASO compounds useful in methods of treating patients by delivery of the oligonucleotides to the patient in vivo.

[0117] In some embodiments the invention provides, a method of downregulating one or more immune checkpoint proteins in a cell or in a patient, by administration of a therapeutically effective amount of a compound or antisense oligonucleotide according to the invention and which is complementary to the target and selected from the list of CD274, PDCD1LG2, CD80, CD86, CD276, VTCN1, TNFRSF14, LGALS9, IDO1, HMOX1, PDCD1, CTLA4, LAG3, HAVCR2, TDO2, TIGIT, VSIR, CEACAM1, NT5E, KIR2DL1, and KIR2DL3. In some embodiments, the antisense oligonucleotide used in the method is complementary to anyone of the sequences selected from the list of anyone of SEQ ID NOs: 1-375, or anyone of SEQ ID NOs: 1473-1503, or anyone of SEQ ID NOs: 1535-1593 or to SEQ ID NO: 1654, or to anyone of SEQ ID NOs: 1655-2001, or to anyone of SEQ ID NOs: 3044-3052, or to anyone of SEQ ID NOs: 3062-3097. In some embodiments, the antisense oligonucleotide for use in the method of treatment is selected from the list of SEQ ID NOs: 376-1472, or anyone of SEQ ID NOs: 1504-1534, or anyone of SEQ ID NOs: 1594-1653, or anyone of SEQ ID NOs: 2002-3043, or anyone of SEQ ID NOs: 3053-3061, or anyone of SEQ ID NOs: 3098-3133.

[0118] In some embodiments, the method of treatment is used to treat a cell in a human body. In some embodiments, the method of treatment is used to treat a cancer cell in a human body. In some embodiments, the method of treatment is a method of treating cancer, comprising the administration of a therapeutically effective dosage of a compound or antisense oligonucleotide or a composition according to the invention, such as anyone of the oligonucleotides selected from the list of SEQ ID NOs: 376-1472, or anyone of SEQ ID NOs: 1504-1534, or anyone of SEQ ID NOs: 1594-1653, or anyone of SEQ ID NOs: 2002-3043, or anyone of SEQ ID NOs: 3053-3061, or anyone of SEQ ID NOs: 3098-3133.

[0119] In some embodiments, the cancer which is treated by the method of treatment is cancer expressing a mRNA coding for an immune checkpoint protein, such as anyone of CD274, PDCD1LG2, CD80, CD86, CD276, VTCN1, TNFRSF14, LGALS9, IDO1, HMOX1, PDCD1, CTLA4, LAGS, HAVCR2, TDO2, TIGIT, VSIR, CEACAM1, NT5E, KIR2DL1, and KIR2DL3. In some embodiments, the antisense oligonucleotides, compounds or compositions according to the invention is for use in methods of treatment of a cancer selected from the list of cancer, including solid tumors such as skin, breast, brain, cervical carcinomas, testicular carcinomas, etc. More particularly, cancers that may be treated by the compounds, compositions and methods of the invention include, but are not limited to: Cardiac: sarcoma (angiosarcoma, fibrosarcoma, rhabdomyosarcoma, liposarcoma), myxoma, rhabdomyoma, fibroma, lipoma and teratoma; Lung: bronchogenic carcinoma (squamous cell, undifferentiated small cell, undifferentiated large cell, adenocarcinoma), alveolar (bronchiolar) carcinoma, bronchial adenoma, sarcoma, lymphoma, chondromatous hamartoma, mesothelioma; Gastrointestinal: esophagus (squamous cell carcinoma, adenocarcinoma, leiomyosarcoma, lymphoma), stomach (carcinoma, lymphoma, leiomyosarcoma), pancreas (ductal adenocarcinoma, insulinoma, glucagonoma, gastrinoma, carcinoid tumors, vipoma), small bowel (adenocarcinoma, lymphoma, carcinoid tumors, Karposi's sarcoma, leiomyoma, hemangioma, lipoma, neurofibroma, fibroma), large bowel (adenocarcinoma, tubular adenoma, villous adenoma, hamartoma, leiomyoma); Genitourinary tract: kidney (adenocarcinoma, Wilm's tumor [nephroblastoma], lymphoma, leukemia), bladder and urethra (squamous cell carcinoma, transitional cell carcinoma, adenocarcinoma), prostate (adenocarcinoma, sarcoma), testis (seminoma, teratoma, embryonal carcinoma, teratocarcinoma, choriocarcinoma, sarcoma, interstitial cell carcinoma, fibroma, fibroadenoma, adenomatoid tumors, lipoma); Liver: hepatoma (hepatocellular carcinoma), cholangiocarcinoma, hepatoblastoma, angiosarcoma, hepatocellular adenoma, hemangioma; Bone: osteogenic sarcoma (osteosarcoma), fibrosarcoma, malignant fibrous histiocytoma, chondrosarcoma, Ewing's sarcoma, malignant lymphoma (reticulum cell sarcoma), multiple mycloma, malignant giant cell tumor chordoma, osteochronfroma (osteocartilaginous exostoses), benign chondroma, chondroblastoma, chondromyxofibroma, osteoid osteoma and giant cell tumors; Nervous system: skull (osteoma, hemangioma, granuloma, xanihoma, osteitis deformans), meninges (meningioma, meningiosarcoma, gliomatosis), brain (astrocytoma, medulloblastoma, glioma, ependymoma, germinoma [pinealoma], glioblastoma multiform, oligodendroglioma, schwannoma, retinoblastoma, congenital tumors), spinal cord neurofibroma, meningioma, glioma, sarcoma); Gynecological: uterus (endometrial carcinoma), cervix (cervical carcinoma, pre-tumor cervical dysplasia), ovaries (ovarian carcinoma [serous cystadenocarcinoma, mucinous cystadenocarcinoma, unclassified carcinoma], granulosa-thecal cell tumors, Sertoli-Leydig cell tumors, dysgerininoma, malignant teratoma), vulva (squamous cell carcinoma, intraepithelial carcinoma, adenocarcinoma, fibrosarcoina, melanoma), vagina (clear cell carcinoma, squamous cell carcinoma, botryoid sarcoma (embryonal rhabdomyosarcoma), fallopian tubes (carcinoma); Hematologic: blood (myeloid leukemia [acute and chronic], acute lymphoblastic leukemia, chronic lymphocytic leukemia, myeloproliferative diseases, multiple myeloma, myelodysplastic syndrome), Hodgkin's disease, non-Hodgkin's lymphoma [malignant lymphoma]; Skin: malignant melanoma, basal cell carcinoma, squamous cell carcinoma, Karposi's sarcoma, moles dysplastic nevi, lipoma, angioma, dermatofibroma, keloids, psoriasis; and Adrenal glands: neuroblastoma.

[0120] In some instances, additive or synergistic effects may be achieved by combining the use of different drugs in methods of treatment. In some embodiments, the methods of treatment using the antisense oligonucleotides of the invention are for use in combination with another compound, composition or method of treatment. In some embodiments, the combination is with an immune checkpoint protein blocking antibody or a composition comprising an immune checkpoint protein blocking antibody or a method of treatment wherein an Immune Checkpoint Protein blocking antibody is used.

[0121] In some embodiments, the antisense oligonucleotides of the invention comprising any one of SEQ ID NOs: 376-1472, or anyone of SEQ ID NOs: 1504-1534, or anyone of SEQ ID NOs: 1594-1653, or anyone of SEQ ID

[0122] NOs: 2002-3043, or anyone of SEQ ID NOs: 3053-3061, or anyone of SEQ ID NOs: 3098-3133, are for use in combination with another drug or treatment for cancer. In some embodiments, the antisense oligonucleotides of the invention comprising any one of SEQ ID NOs: 376-1472, or anyone of SEQ ID NOs: 1504-1534, or anyone of SEQ ID NOs: 1594-1653, or anyone of SEQ ID NOs: 2002-3043, or anyone of SEQ ID NOs: 3053-3061, or anyone of SEQ ID NOs: 3098-3133, are for use in combination with another active ingredient. The antisense oligonucleotides of the invention may be formulated together with such other ingredient or drug, or they may be formulated separately.

### Dosages and Compositions

[0123] The antisense oligonucleotides of the invention may be used in pharmaceutical formulations and compositions, and are for use in treatment of diseases according to the invention. The compounds and compositions will be used in effective dosages, which means in dosages that are sufficient to achieve a desired effect on a disease parameter. The skilled person will without undue burden be able to determine what a reasonably effective dosage is for individual patients.

[0124] As explained initially, the antisense oligonucleotides of the invention will constitute suitable drugs with improved properties. The design of a potent and safe drug requires the fine-tuning of various parameters such as affinity/specificity, stability in biological fluids, cellular uptake, mode of action, pharmacokinetic properties and toxicity. Accordingly, in a further aspect the antisense oligonucleotide may be used in a pharmaceutical composition comprising an oligonucleotide according to the invention and a pharmaceutically acceptable diluent, carrier or adjuvant. Preferably said carrier is saline or buffered saline. In a still further aspect the present invention relates to an antisense oligonucleotide according to the present invention for use as a medicament.

[0125] As will be understood, dosing is dependent on severity and responsiveness of the disease state to be treated, and the course of treatment lasting from several days to several months, or until a cure is effected or a diminution of the disease state is achieved. Optimal dosing schedules can be calculated from measurements of drug accumulation in the body of the patient. Optimum dosages may vary depending on the relative potency of individual oligonucleotides. Generally it can be estimated based on EC₅₀ values found to be effective in vitro and in vivo animal models. In general, dosage is from 0.01 μg to 1 g per kg of body weight, and may be given once or more daily, weekly, monthly or yearly, or even once every 2 to 10 years or by continuous infusion for hours up to several months. The repetition rates for dosing can be estimated based on measured residence times and concentrations of the drug in bodily fluids or tissues.

[0126] Following successful treatment, it may be desirable to have the patient undergo maintenance therapy to prevent the recurrence of the disease state. As indicated above, the invention also relates to a pharmaceutical composition, which comprises at least one oligonucleotide of the invention as an active ingredient. It should be understood that the pharmaceutical composition according to the invention optionally comprises a pharmaceutical carrier, and that the pharmaceutical composition optionally comprises further active compounds, such as in non-limiting example chemotherapeutic compounds or anticancer vaccines.

[0127] The oligonucleotides of the invention can be used “as is” or in form of a variety of pharmaceutically acceptable salts. As used herein, the term “pharmaceutically acceptable salts” refers to salts that retain the desired biological activity of the herein-identified antisense oligonucleotides and exhibit minimal undesired toxicological effects. Non-limiting examples of such salts can be formed with organic amino acid and base addition salts formed with metal cations such as zinc, calcium, bismuth, barium, magnesium, aluminum, copper, cobalt, nickel, cadmium, sodium, potassium, and the like, or with a cation formed from ammonia, N,N-dibenzylethylene-diamine, D-glucosamine, tetraethylammonium, or ethylenediamine.

[0128] Thus the present invention provides pharmaceutical compositions comprising the antisense oligonucleotide or compound according to the invention and at least one pharmaceutically-acceptable carrier.

[0129] In some embodiments, the pharmaceutical composition of the invention comprises 1, 2, 3, 4, 5, 6, 7, 8, 9 or 10 antisense oligonucleotides according to the invention, wherein the antisense oligonucleotides are selected so that the composition target at least two immune checkpoint proteins.

[0130] In some embodiments, the pharmaceutical composition according to the invention target any comprises antisense oligonucleotides according to the invention so that the composition is capable of targeting any one of 2, 3, 4, 5, 6, 7, 8, 9 or 10 different immune checkpoint proteins.

[0131] In some embodiments, the invention provides a pharmaceutical composition, wherein the composition comprises more than one compound or antisense oligonucleotide according to the invention.

[0132] In some embodiments, a pharmaceutical composition is provided comprising two or more antisense oligonucleotides selected from the list of any one of SEQ ID NOs: 376-1472, or anyone of SEQ ID NOs: 1504-1534, or anyone of SEQ ID NOs: 1594-1653, or anyone of SEQ ID NOs: 2002-3043, or anyone of SEQ ID NOs: 3053-3061, or anyone of SEQ ID NOs: 3098-3133, or which are complementary to anyone of SEQ ID NOs: 1-375, or anyone of SEQ ID NOs: 1473-1503, or anyone of SEQ ID NOs: 1535-1593 or to SEQ ID NO: 1654, or to anyone of SEQ ID NOs: 1655-2001, or to anyone of SEQ ID NOs: 3044-3052, or to anyone of SEQ ID NOs: 3062-3097.

[0133] In some embodiments, the antisense oligonucleotide, compound or composition of the invention is for use as a medicament.

[0134] In some embodiments, the antisense oligonucleotide, compound or composition according to the invention is for use in the treatment of cancer. In some embodiments, the antisense oligonucleotide, compound or composition according to the invention is for treatment of cancer, wherein the cancer is hepatocellular carcinoma.

[0135] In some embodiments, the antisense oligonucleotide, compound or composition is for use in the treatment of a human subject.

### Targeted Delivery

[0136] When the antisense oligonucleotides of the present invention are for in vivo use in medicine, various means for delivery may be used in order to achieve efficient targeted delivery to cells and tissues.

[0137] Targeted delivery of an antisense oligonucleotide is done depending on the target cell or tissue to reach. Such delivery may be modified by conjugation with a ligand in order to facilitate targeted delivery of the antisense oligonucleotide to target cells and tissues. In some embodiments, the antisense oligonucleotides may be formulated in saline for naked delivery. In some embodiments, the antisense oligonucleotide of the invention is conjugated to anyone of folic acid or N-acetylgalactosamine (GalNAc). In some embodiments, the antisense oligonucleotide according to the invention is made for unconjugated delivery in a pharmaceutical composition. In some embodiments, the antisense oligonucleotide according to the invention is formulated in lipid nanoparticles for delivery to cells in vivo or ex vivo.

[0138] There are several approaches for oligonucleotide delivery. One approach is to use a nanoparticle formulation, which determines the tissue distribution and the cellular interactions of the oligonucleotide. Another approach is to use a delivery vehicle to enhance the cellular uptake, in one or more embodiment the vehicle is anyone of folic acid or GalNAc. A third delivery approach is wherein the oligonucleotide is made unconjugated for delivery in a pharmaceutical composition.

[0139] The various examples of delivery may be carried out as parenteral administration. By “Parenteral administration” means administration through infusion or injection and comprises intravenous administration, subcutaneous administration, intramuscular administration, intracranial administration, intraperitoneal administration or intra-arterial administration.

[0140] The various examples of delivery may be carried out as oral or nasal administration. The nanoparticle formulation can be a liposomal formulation and in one embodiment the anionic oligonucleotide is complexed with a cationic lipid thereby forming lipid nanoparticles. Such lipid nanoparticles are useful for treating liver diseases. The nanoparticle formulation can also be a polymeric nanoparticle (Juliano et. Al.; Survey and summary, the delivery of therapeutic oligonucleotides, Nucleic Acids Research, 2016).

[0141] The vehicle used in vehicle-conjugated formulation can be e.g. a lipid vehicle or a polyamine vehicle. One example of a polyamine vehicle is GalNAc—a high-affinity ligand for the hepatocyte-specific asialoglycoprotein receptor (ASGPR). GalNAc-conjugated ASOs show enhanced uptake to hepatocytes instead of non-parenchymal cells since after entry into the cells, the ASO is liberated in the liver (Prakash et. al.; Targeted delivery of antisense oligonucleotides to hepatocytes using triantennary N-acetyl galactosamine improves potency 10-fold in mice, Nucleic acids research, 2014, vol. 42, no. 13, 8796-8807). GalNAc conjugated ASOs may also enhance potency and duration of some ASOs targeting human apolipoprotein C-III and human transthyretin (TTR). Folic acid (FA) conjugated ASOs can be used to target the folate receptor that is a cellular surface markers for many solid tumours and myeloid leukemias (Chiu et. al.; Efficient Delivery of an Antisense Oligodeoxyribonucleotide Formulated in Folate Receptor-targeted Liposomes).

[0142] In methods using so-called naked delivery, the oligonucleotide is formulated into a solution comprising saline. This approach is effective in many kinds of cell types among others: primary cells, dividing and non-dividing cells (Soifer et. al.; Silencing of Gene Expression by Gymnotic Delivery of Antisense Oligonucleotides; chapter 25; Michael Kaufmann and Claudia Klinger (eds.), Functional Genomics: Methods and Protocols). Formulations of the pharmaceutical compositions described herein may be prepared by methods known in the art of formulation. The preparatory methods may include bringing the antisense oligonucleotide into association with a diluent or another excipient and/or one or more other ingredients, and then if desirable, packaging (e.g. shaping) the product into a desired single- or multi-dose unit. The amount of the antisense oligonucleotide depends on the delivery approach and the specific formulation. The amount of the antisense oligonucleotide will also depend on the subject to be treated (size and condition) and also depend on route of administration. An antisense oligonucleotide, a conjugate or a pharmaceutical composition of the present invention is typically administered in an effective amount.

[0143] By way of example, the composition may comprise between 0.1% and 100% (w/w) of the antisense oligonucleotide.

[0144] The pharmaceutical formulations according to the present invention may also comprise one or more of the following: a pharmaceutically acceptable excipient, e.g. one or more solvents, dispersion media, diluents, liquid vehicles, dispersion or suspension aids, isotonic agents, surface active agents, preservatives, solid binders, thickening or emulsifying agents, lubricants and the like. It is of cause important that the added excipient are pharmaceutically acceptable and suited to the particular dosage form desired. Remington's The Science and Practice of Pharmacy, 21″Edition, A. R. Gennaro (Lippincott, Williams 8 Wilkins, Baltimore, Md., 2006; incorporated herein by reference) discloses various excipients used in formulating pharmaceutical compositions and known techniques for the preparation thereof.

[0145] In some embodiments, potential side effects from treatment with immune checkpoint inhibiting antisense oligonucleotides, such as breaking of immune self-tolerance, may be reduced or avoided by introducing means for target cell specific delivery, such as those described above for improving uptake or selective uptake of the antisense oligonucleotides in the target cells such as cancer cells, without the introduction of a general uptake increase in normal cells or in other tissues.

[0146] Thus, in some embodiments, the antisense oligonucleotide according to any one of the preceding claims, wherein the antisense oligonucleotide is conjugated with a ligand for targeted delivery. In some embodiments, the antisense oligonucleotide according to the invention is conjugated with folic acid or N-acetylgalactosamine (GalNAc). In some embodiments, the antisense oligonucleotide according to the invention is unconjugated. In some embodiments, the antisense oligonucleotide according to the invention is formulated in lipid nanoparticles for delivery to cells in vivo in a patient or to cells ex vivo.

[0147] When describing the embodiments of the present invention, the combinations and permutations of all possible embodiments have not been explicitly described. Nevertheless, the mere fact that certain measures are recited in mutually different dependent claims or described in different embodiments does not indicate that a combination of these measures cannot be used to advantage. The present invention envisages all possible combinations and permutations of the described embodiments.

[0148] The terms “comprising”, “comprise” and “comprises” herein are intended to be optionally substitutable with the terms “consisting of”, “consist of” and “consist of”, respectively, in every instance.

[0149] The invention will be more fully understood by reference to the following examples. They should not, however, be construed as limiting the scope of the invention. All literature citations are incorporated by reference.

### EXAMPLES

[0150] Example 1. LNA monomer and oligonucleotide synthesis may be performed using the methodology referred to in Examples 1 and 2 of WO2007/11275. Assessment of the stability of LNA oligonucleotides in human or rat plasma may be performed using the methodology referred to in Example 4 of WO2007/112754. Treatment of cultured cells with LNA-modified antisense oligonucleotides may be performed using the methodology referred to in Example 6 of WO2007/11275.

[0151] Example 2. RNA isolation and expression analysis from cultured cells and tissues is performed using the methodology referred to in Example 10 of WO2007/112754. RNAseq-based transcriptional profiling from cultured cells and tissues is performed using the methodology referred to in (Djebali et al. Nature 489: 101-108 or Chu et al. Nucleic Acid Ther. 22: 271-274 or Wang et al. Nature Reviews Genetics 10: 57-63).

[0152] Example 3. General Description of the Antisense Oligonucleotide Design Workflow.

[0153] Antisense oligonucleotides capable of decreasing the expression of target transcript(s) are designed as RNaseH-recruiting gapmer oligonucleotides. Gapmer oligonucleotides are designed by applying various locked nucleic acid (LNA)/DNA patterns (typically the patterns constitute a central region of DNA flanked by short LNA wings, e.g. LLLDDDDDDDDDDLLL, where L denotes LNA and D denotes DNA) to the reverse complement of target site sequences. Oligonucleotides that can bind to target sites with desired specificity in the transcriptome and have desired properties are synthesized and tested in vitro in cancer cell lines and subsequently in vivo in mouse tumour models. The ASOs of this invention, are listed in Table 3.1, 3.2, 5.1, 5.2, and 7.1 and 7.2 (LNA=uppercase, DNA lowercase, complete phosphorothioate backbone), and examples demonstrating their potential in knocking down PD1 (PDCD1) and CTLA-4 are described in example 5 below.

[0154] Example 4. Design of LNA-Modified Antisense Oligonucleotides for Knockdown of Multiple Targets.

[0155] LNA antisense oligonucleotides that can effectively knock down multiple targets listed in Table 1.1 and 1.2 were designed.

[0156] Table 1.1 and Table 1.2. List of targets comprise genes in antigen-presenting cells (APC)T cells and natural killer (NK) cells . The identity of the target genes and transcripts, and their corresponding mouse genes and transcripts are also described under “Terms and definitions” in the Detailed description above.

TABLE 1.1

| human | Target | | | |
|---|---|---|---|---|
| symbol | cell | alias | Ensembl gene id* | Ensembl transcript id* |
| CD274 | APC | PDL1 | ENSG00000120217 | ENST00000381577 |
| PDCD1LG2 | APC | PDL2 | ENSG00000197646 | ENST00000397747 |
| CD80 | APC | CD80 | ENSG00000121594 | ENST00000264246 |
| CD86 | APC | CD86 | ENSG00000114013 | ENST00000330540 |
| CD276 | APC | B7-H3 | ENSG00000103855 | ENST00000318443 |
| VTCN1 | APC | B7-H4 | ENSG00000134258 | ENST00000369458 |
| TNFRSF14 | APC | HVEM | ENSG00000157873 | ENST00000355716 |
| LGALS9 | APC | GAL9 | ENSG00000168961 | ENST00000395473 |
| IDO1 | APC | IDO1 | ENSG00000131203 | ENST00000518237 |
| HMOX1 | APC | HO1 | ENSG00000100292 | ENST00000216117 |
| PDCD1 | T cell | PD1 | ENSG00000188389 | ENST00000334409 |
| CTLA4 | T cell | CTLA4 | ENSG00000163599 | ENST00000302823 |

*Ensembl release 89

TABLE 1.2

| human | Target | | | |
|---|---|---|---|---|
| symbol | cell | alias | Ensembl gene id* | Ensembl transcript id* |
| LAG3 | T cell | LAG3 | ENSG00000089692 | ENST00000203629 |
| HAVCR2 | T cell | TIM3 | ENSG00000135077 | ENST00000307851 |
| TDO2 | APC | TDO | ENSG00000151790 | ENST00000536354 |
| TIGIT | T cell | TIGIT | ENSG00000181847 | ENST00000486257 |
| VSIR | APC | VISTA | ENSG00000107738 | ENST00000394957 |
| CEACAM1 | T cell | CECAM1 | ENSG00000079385 | ENST00000161559 |
| NT5E | APC | CD73 | ENSG00000135318 | ENST00000257770 |
| KIR2DL1 | NK cell | KIR2DL1 | ENSG00000125498 | ENST00000336077 |
| KIR2DL3 | NK cell | KIR2DL3 | ENSG00000243772 | ENST00000342376 |

*Ensembl release 89

[0157] In this example, the target sites (or target sequence in the Immune Checkpoint Protein encoding mRNAs) are shared by two or more targets in Table 1.1 and Table 1.2 and they have no more than ten predicted perfect match off-targets (Table 2.1: SEQ ID NOs: 1-361) (Table 2.2: SEQ ID Nos: 1653-1999). Additionally, target sites that are shared between two or more target transcripts by allowing for 1 mismatch are also considered (Table2.1: SEQ ID NOs: 362-376).

TABLE 2.1

| SEQ | | | |
|---|---|---|---|
| ID | target sequence | | |
| NO | (5′-3′) | targets | oligoID |
| 1 | AUCAGUCAUAAUCU | CD274\|IDO1 | |
| 2 | CAUUCUCCUGACCC | CD274\|PDCD1LG2 | |
| 3 | UCCAUGCCUUCUUUG | CD274\|PDCD1LG2 | |
| 4 | GAUAAAAAGUGUCA | CD276\|CD274 | |
| 5 | AGAGGAUAUGAAGC | CD276\|CD86 | |
| 6 | AGGAACUGAUCUUC | CD276\|CD86 | |
| 7 | CAGGCUCCUAGGAA | CD276\|CD86 | |
| 8 | GAGAGUUCUUCUCU | CD276\|CD86 | |
| 9 | GCCCAAGCCCUUCU | CD276\|CD86 | |
| 10 | GGCCCAAGCCCUUCU | CD276\|CD86 | |
| 11 | GGGCCCAAGCCCUU | CD276\|CD86 | |
| 12 | GGGCCCAAGCCCUUC | CD276\|CD86 | |
| 13 | GGGCCCAAGCCCUUCU | CD276\|CD86 | |
| 14 | UUGCCUCUGGCCAGC | CD276\|CD86 | |
| 15 | AAGGUUUAUAAUCC | CD276\|PDCD1LG2 | |
| 16 | GUAAGGUUUAUAAUC | CD276\|PDCD1LG2 | |
| 17 | GUAAGGUUUAUAAUCC | CD276\|PDCD1LG2 | |
| 18 | UAAGGUUUAUAAUC | CD276\|PDCD1LG2 | |
| 19 | UAAGGUUUAUAAUCC | CD276\|PDCD1LG2 | |
| 20 | CCCUCCCAGGACCUU | CD276\|TNFRSF14 | |
| 21 | CUGCAGCCUCUGAAA | CD276\|VTCN1 | |
| 22 | CUUCACUGGGGUUUU | CD276\|VTCN1 | |
| 23 | CUUCACUGGGGUUUUG | CD276\|VTCN1 | |
| 24 | GCUUCACUGGGGUU | CD276\|VTCN1 | |
| 25 | GCUUCACUGGGGUUU | CD276\|VTCN1 | |
| 26 | GCUUCACUGGGGUUUU | CD276\|VTCN1 | |
| 27 | GCUUCACUGGGGUUUUG | CD276\|VTCN1 | |
| 28 | GGCUUCACUGGGGU | CD276\|VTCN1 | |
| 29 | GGCUUCACUGGGGUU | CD276\|VTCN1 | |
| 30 | GGCUUCACUGGGGUUU | CD276\|VTCN1 | |
| 31 | GGCUUCACUGGGGUUUU | CD276\|VTCN1 | |
| 32 | GGCUUCACUGGGGUUUUG | CD276\|VTCN1 | |
| 33 | GGGUCAGGGAAAGAG | CD276\|VTCN1 | |
| 34 | UAGAAUCUGCUCCU | CD276\|VTCN1 | |
| 35 | UCCUUGACUGGGUA | CD276\|VTCN1 | |
| 36 | UUCACUGGGGUUUUG | CD276\|VTCN1 | |
| 37 | CAACCAGGUUUGAG | CD80\|CD274 | |
| 38 | UGACAUUCAUCUUC | CD80\|CD274 | |
| 39 | UGGGUAACUAAAUG | CD80\|CD274 | |
| 40 | UUGGGUAACUAAAU | CD80\|CD274 | |
| 41 | UUGGGUAACUAAAUG | CD80\|CD274 | |
| 42 | AACCAAGCAAGAGC | CD80\|CD86 | |
| 43 | AACCAAGCAAGAGCA | CD80\|CD86 | |
| 44 | ACCAAGCAAGAGCA | CD80\|CD86 | |
| 45 | AGUAACUGAUGAUG | CD80\|CD86 | |
| 46 | CACUUUGAGUUUCAG | CD80\|CD86 | |
| 47 | CACUUUGAGUUUCAGU | CD80\|CD86 | |
| 48 | CAGAUCACCUUAGA | CD80\|CD86 | |
| 49 | CCUCAGAAAAUUAAAAAUAG | CD80\|CD86 | |
| 50 | GAUGGAGAAAUGAAC | CD80\|CD86 | |
| 51 | GCUUUACCCAGGAG | CD80\|CD86 | |
| 52 | GGAUGGAGAAAUGAA | CD80\|CD86 | |
| 53 | GGAUGGAGAAAUGAAC | CD80\|CD86 | |
| 54 | GGCUUUACCCAGGA | CD80\|CD86 | |
| 55 | GGCUUUACCCAGGAG | CD80\|CD86 | |
| 56 | GUUCCUCAGAAAAUUAAAAA | CD80\|CD86 | |
| 57 | GUUCUGUUUGCCUCU | CD80\|CD86 | |
| 58 | UCAGAAAAUUAAAAAUAGAA | CD80\|CD86 | |
| 59 | UGUUCUGUUUGCCUC | CD80\|CD86 | |
| 60 | UGUUCUGUUUGCCUCU | CD80\|CD86 | |
| 61 | CUCUAAUCUAGCAG | CD80\|IDO1 | |
| 62 | AAAUCUCAGCUAAG | CD80\|PDCD1LG2 | |
| 63 | AGGUAUUUAAUUGG | CD80\|PDCD1LG2 | |
| 64 | CAGGUAUUUAAUUG | CD80\|PDCD1LG2 | |
| 65 | CAGGUAUUUAAUUGG | CD80\|PDCD1LG2 | |
| 66 | CUUUUGUAACCACC | CD80\|PDCD1LG2 | |
| 67 | UUAAAAAUACAAGAAAU | CD80\|PDCD1LG2 | |
| 68 | UUAAAAAUACAAGAAAUU | CD80\|PDCD1LG2 | |
| 69 | AAAGAGCCUCUCAA | CD80\|VTCN1 | |
| 70 | AAAGGAAGGAAAUCCUA | CD80\|VTCN1 | |
| 71 | AAAGGAAGGAAAUCCUAU | CD80\|VTCN1 | |
| 72 | AAAGGAAGGAAAUCCUAUC | CD80\|VTCN1 | |
| 73 | AAAGGAAGGAAAUCCUAUCA | CD80\|VTCN1 | |
| 74 | AAAUCCUAUCAUAUG | CD80\|VTCN1 | |
| 75 | AAAUCCUAUCAUAUGC | CD80\|VTCN1 | |
| 76 | AAAUCCUAUCAUAUGCU | CD80\|VTCN1 | |
| 77 | AAAUCCUAUCAUAUGCUA | CD80\|VTCN1 | |
| 78 | AAGGAAAUCCUAUCAUA | CD80\|VTCN1 | |
| 79 | AAGGAAAUCCUAUCAUAU | CD80\|VTCN1 | |
| 80 | AAGGAAAUCCUAUCAUAUG | CD80\|VTCN1 | |
| 81 | AAGGAAAUCCUAUCAUAUGC | CD80\|VTCN1 | |
| 82 | AAGGAAGGAAAUCCUA | CD80\|VTCN1 | |
| 83 | AAGGAAGGAAAUCCUAU | CD80\|VTCN1 | |
| 84 | AAGGAAGGAAAUCCUAUC | CD80\|VTCN1 | |
| 85 | AAGGAAGGAAAUCCUAUCA | CD80\|VTCN1 | |
| 86 | AAGGAAGGAAAUCCUAUCAU | CD80\|VTCN1 | |
| 87 | AAUCCUAUCAUAUGC | CD80\|VTCN1 | |
| 88 | AAUCCUAUCAUAUGCU | CD80\|VTCN1 | |
| 89 | AAUCCUAUCAUAUGCUA | CD80\|VTCN1 | |
| 90 | AGAGUUUCAGAUUUGCAAA | CD80\|VTCN1 | |
| 91 | AGAGUUUCAGAUUUGCAAAA | CD80\|VTCN1 | |
| 92 | AGAUUUGCAAAAUGAA | CD80\|VTCN1 | |
| 93 | AGAUUUGCAAAAUGAAA | CD80\|VTCN1 | |
| 94 | AGAUUUGCAAAAUGAAAA | CD80\|VTCN1 | |
| 95 | AGGAAAUCCUAUCAUA | CD80\|VTCN1 | |
| 96 | AGGAAAUCCUAUCAUAU | CD80\|VTCN1 | |
| 97 | AGGAAAUCCUAUCAUAUG | CD80\|VTCN1 | |
| 98 | AGGAAAUCCUAUCAUAUGC | CD80\|VTCN1 | |
| 99 | AGGAAAUCCUAUCAUAUGCU | CD80\|VTCN1 | |
| 100 | AGGAAGGAAAUCCUA | CD80\|VTCN1 | |
| 101 | AGGAAGGAAAUCCUAU | CD80\|VTCN1 | |
| 102 | AGGAAGGAAAUCCUAUC | CD80\|VTCN1 | |
| 103 | AGGAAGGAAAUCCUAUCA | CD80\|VTCN1 | |
| 104 | AGGAAGGAAAUCCUAUCAU | CD80\|VTCN1 | |
| 105 | AGGAAGGAAAUCCUAUCAUA | CD80\|VTCN1 | |
| 106 | AGUUUCAGAUUUGCAAA | CD80\|VTCN1 | |
| 107 | AGUUUCAGAUUUGCAAAA | CD80\|VTCN1 | |
| 108 | AGUUUCAGAUUUGCAAAAU | CD80\|VTCN1 | |
| 109 | AGUUUCAGAUUUGCAAAAUG | CD80\|VTCN1 | |
| 110 | AUAGAGUUUCAGAUUU | CD80\|VTCN1 | |
| 111 | AUAGAGUUUCAGAUUUG | CD80\|VTCN1 | |
| 112 | AUAGAGUUUCAGAUUUGC | CD80\|VTCN1 | |
| 113 | AUAGAGUUUCAGAUUUGCA | CD80\|VTCN1 | |
| 114 | AUAGAGUUUCAGAUUUGCAA | CD80\|VTCN1 | |
| 115 | AUCCUAUCAUAUGC | CD80\|VTCN1 | |
| 116 | AUCCUAUCAUAUGCU | CD80\|VTCN1 | |
| 117 | AUCCUAUCAUAUGCUA | CD80\|VTCN1 | |
| 118 | CAGAUUUGCAAAAUG | CD80\|VTCN1 | |
| 119 | CAGAUUUGCAAAAUGA | CD80\|VTCN1 | |
| 120 | CAGAUUUGCAAAAUGAA | CD80\|VTCN1 | |
| 121 | CAGAUUUGCAAAAUGAAA | CD80\|VTCN1 | |
| 122 | CAGAUUUGCAAAAUGAAAA | CD80\|VTCN1 | |
| 123 | CAGUGAACAAAGGAG | CD80\|VTCN1 | |
| 124 | CCUAUCAUAUGCUA | CD80\|VTCN1 | |
| 125 | CUAAGAAGCACCUA | CD80\|VTCN1 | |
| 126 | CUUUUUAAACAAACAA | CD80\|VTCN1 | |
| 127 | GAAAUCCUAUCAUAU | CD80\|VTCN1 | |
| 128 | GAAAUCCUAUCAUAUG | CD80\|VTCN1 | |
| 129 | GAAAUCCUAUCAUAUGC | CD80\|VTCN1 | |
| 130 | GAAAUCCUAUCAUAUGCU | CD80\|VTCN1 | |
| 131 | GAAAUCCUAUCAUAUGCUA | CD80\|VTCN1 | |
| 132 | GAAGGAAAUCCUAUCAU | CD80\|VTCN1 | |
| 133 | GAAGGAAAUCCUAUCAUA | CD80\|VTCN1 | |
| 134 | GAAGGAAAUCCUAUCAUAU | CD80\|VTCN1 | |
| 135 | GAAGGAAAUCCUAUCAUAUG | CD80\|VTCN1 | |
| 136 | GAGUUUCAGAUUUGCAAA | CD80\|VTCN1 | |
| 137 | GAGUUUCAGAUUUGCAAAA | CD80\|VTCN1 | |
| 138 | GAGUUUCAGAUUUGCAAAAU | CD80\|VTCN1 | |
| 139 | GAUUUGCAAAAUGAAA | CD80\|VTCN1 | |
| 140 | GAUUUGCAAAAUGAAAA | CD80\|VTCN1 | |
| 141 | GCAGUGAACAAAGGA | CD80\|VTCN1 | |
| 142 | GCAGUGAACAAAGGAG | CD80\|VTCN1 | |
| 143 | GGAAAUCCUAUCAUA | CD80\|VTCN1 | |
| 144 | GGAAAUCCUAUCAUAU | CD80\|VTCN1 | |
| 145 | GGAAAUCCUAUCAUAUG | CD80\|VTCN1 | |
| 146 | GGAAAUCCUAUCAUAUGC | CD80\|VTCN1 | |
| 147 | GGAAAUCCUAUCAUAUGCU | CD80\|VTCN1 | |
| 148 | GGAAAUCCUAUCAUAUGCUA | CD80\|VTCN1 | |
| 149 | GGAAGGAAAUCCUAU | CD80\|VTCN1 | |
| 150 | GGAAGGAAAUCCUAUC | CD80\|VTCN1 | |
| 151 | GGAAGGAAAUCCUAUCA | CD80\|VTCN1 | |
| 152 | GGAAGGAAAUCCUAUCAU | CD80\|VTCN1 | |
| 153 | GGAAGGAAAUCCUAUCAUA | CD80\|VTCN1 | |
| 154 | GGAAGGAAAUCCUAUCAUAU | CD80\|VTCN1 | |
| 155 | GUUUCAGAUUUGCAAA | CD80\|VTCN1 | |
| 156 | GUUUCAGAUUUGCAAAA | CD80\|VTCN1 | |
| 157 | GUUUCAGAUUUGCAAAAU | CD80\|VTCN1 | |
| 158 | GUUUCAGAUUUGCAAAAUG | CD80\|VTCN1 | |
| 159 | GUUUCAGAUUUGCAAAAUGA | CD80\|VTCN1 | |
| 160 | UAGAGUUUCAGAUUUG | CD80\|VTCN1 | |
| 161 | UAGAGUUUCAGAUUUGC | CD80\|VTCN1 | |
| 162 | UAGAGUUUCAGAUUUGCA | CD80\|VTCN1 | |
| 163 | UAGAGUUUCAGAUUUGCAA | CD80\|VTCN1 | |
| 164 | UAGAGUUUCAGAUUUGCAAA | CD80\|VTCN1 | |
| 165 | UCAGAUUUGCAAAAUG | CD80\|VTCN1 | |
| 166 | UCAGAUUUGCAAAAUGA | CD80\|VTCN1 | |
| 167 | UCAGAUUUGCAAAAUGAA | CD80\|VTCN1 | |
| 168 | UCAGAUUUGCAAAAUGAAA | CD80\|VTCN1 | |
| 169 | UCAGAUUUGCAAAAUGAAAA | CD80\|VTCN1 | |
| 170 | UCCUAUCAUAUGCU | CD80\|VTCN1 | |
| 171 | UCCUAUCAUAUGCUA | CD80\|VTCN1 | |
| 172 | UUCAGAUUUGCAAAA | CD80\|VTCN1 | |
| 173 | UUCAGAUUUGCAAAAU | CD80\|VTCN1 | |
| 174 | UUCAGAUUUGCAAAAUG | CD80\|VTCN1 | |
| 175 | UUCAGAUUUGCAAAAUGA | CD80\|VTCN1 | |
| 176 | UUCAGAUUUGCAAAAUGAA | CD80\|VTCN1 | |
| 177 | UUCAGAUUUGCAAAAUGAAA | CD80\|VTCN1 | |
| 178 | UUUCAGAUUUGCAAAA | CD80\|VTCN1 | |
| 179 | UUUCAGAUUUGCAAAAU | CD80\|VTCN1 | |
| 180 | UUUCAGAUUUGCAAAAUG | CD80\|VTCN1 | |
| 181 | UUUCAGAUUUGCAAAAUGA | CD80\|VTCN1 | |
| 182 | UUUCAGAUUUGCAAAAUGAA | CD80\|VTCN1 | |
| 183 | GUGUGAAUUACAGG | CD86\|CD274 | |
| 184 | GUUUUCCAUAAUUAG | CD86\|CD274 | |
| 185 | GUUUUCCAUAAUUAGG | CD86\|CD274 | |
| 186 | UGUGUGAAUUACAGG | CD86\|CD274 | |
| 187 | UGUUUUCCAUAAUUAG | CD86\|CD274 | |
| 188 | UGUUUUCCAUAAUUAGG | CD86\|CD274 | |
| 189 | UUUUCAUUUACAAAGA | CD86\|CD274 | |
| 190 | UUUUCCAUAAUUAGG | CD86\|CD274 | |
| 191 | AGUGGGAAGCCAAA | CD86\|IDO1 | |
| 192 | AGUGGGAAGCCAAAU | CD86\|IDO1 | |
| 193 | CAGUGGGAAGCCAAA | CD86\|IDO1 | |
| 194 | CAGUGGGAAGCCAAAU | CD86\|IDO1 | |
| 195 | GUGGGAAGCCAAAU | CD86\|IDO1 | |
| 196 | AAGAGAAGGAGAAGAGA | CD86\|LGALS9 | |
| 197 | CAGACAGUCAUCCA | CD86\|LGALS9 | |
| 198 | GAAGAGAAGGAGAAGAG | CD86\|LGALS9 | |
| 199 | GAAGAGAAGGAGAAGAGA | CD86\|LGALS9 | |
| 200 | CCAGUUCCAAACCC | CD86\|PDCD1 | |
| 201 | CUCUCAUCAACCCA | CD86\|PDCD1 | |
| 202 | CUCUCUCAUCAACC | CD86\|PDCD1 | |
| 203 | CUCUCUCAUCAACCC | CD86\|PDCD1 | |
| 204 | CUCUCUCAUCAACCCA | CD86\|PDCD1 | |
| 205 | GCCCAGGCCUGAGAC | CD86\|PDCD1 | |
| 206 | GGAGAUUCUGGGCA | CD86\|PDCD1 | |
| 207 | UCUCUCAUCAACCC | CD86\|PDCD1 | |
| 208 | UCUCUCAUCAACCCA | CD86\|PDCD1 | |
| 209 | AGACACUGGGAGAGG | CD86\|PDCD1LG2 | |
| 210 | CAACCUUCAGAAAG | CD86\|PDCD1LG2 | |
| 211 | CCAUGGAAGGGCCC | CD86\|PDCD1LG2 | |
| 212 | CUUCUUUGAGCCUCAGUUUC | CD86\|PDCD1LG2 | |
| 213 | CUUUUAUCUGCCCAG | CD86\|PDCD1LG2 | |
| 214 | GGAUGGAUGGAAAAA | CD86\|PDCD1LG2 | |
| 215 | UAGACACUGGGAGAG | CD86\|PDCD1LG2 | |
| 216 | UAGACACUGGGAGAGG | CD86\|PDCD1LG2 | |
| 217 | UUCUUAGCUCCUGA | CD86\|PDCD1LG2 | |
| 218 | AGCCGUCACCUCUU | CD86\|TNFRSF14 | |
| 219 | AGCCGUCACCUCUUG | CD86\|TNFRSF14 | |
| 220 | CAGCCGUCACCUCU | CD86\|TNFRSF14 | |
| 221 | CAGCCGUCACCUCUU | CD86\|TNFRSF14 | |
| 222 | CAGCCGUCACCUCUUG | CD86\|TNFRSF14 | |
| 223 | CCAGCCGUCACCUC | CD86\|TNFRSF14 | |
| 224 | CCAGCCGUCACCUCU | CD86\|TNFRSF14 | |
| 225 | CCAGCCGUCACCUCUU | CD86\|TNFRSF14 | |
| 226 | CCAGCCGUCACCUCUUG | CD86\|TNFRSF14 | |
| 227 | GCCGUCACCUCUUG | CD86\|TNFRSF14 | |
| 228 | UGAUGAAGCCCUGG | CD86\|TNFRSF14 | |
| 229 | CACACUACUGUGUA | CD86\|VTCN1 | |
| 230 | GAUGGGCAUGGCUC | CD86\|VTCN1 | |
| 231 | GAUGGGCAUGGCUCC | CD86\|VTCN1 | |
| 232 | GCAGUCCAAAGAUG | CD86\|VTCN1 | |
| 233 | GCCAGGAUAGAGAU | CD86\|VTCN1 | |
| 234 | GGAUGGGCAUGGCUC | CD86\|VTCN1 | |
| 235 | GGAUGGGCAUGGCUCC | CD86\|VTCN1 | |
| 236 | UCUUCUCCUAACUCU | CD86\|VTCN1 | |
| 237 | UUAGCAGCCAGAUC | CD86\|VTCN1 | |
| 238 | UUGGUUUACAAAUGC | CD86\|VTCN1 | |
| 239 | UUUUGCCAAGUCUC | CD86\|VTCN1 | |
| 240 | CUUCCGUAUUCCUC | CTLA4\|CD274 | |
| 241 | CUUCCGUAUUCCUCA | CTLA4\|CD274 | |
| 242 | GAAUUGGAUCAUGG | CTLA4\|CD274 | |
| 243 | UUCCGUAUUCCUCA | CTLA4\|CD274 | |
| 244 | AUCACAGGUGUUGG | CTLA4\|CD86 | |
| 245 | AUCACAGGUGUUGGU | CTLA4\|CD86 | |
| 246 | AUCACAGGUGUUGGUA | CTLA4\|CD86 | |
| 247 | CACAGGUGUUGGUA | CTLA4\|CD86 | |
| 248 | UCACAGGUGUUGGUA | CTLA4\|CD86 | |
| 249 | UAGAGCCCUAGAGU | CTLA4\|LGALS9 | |
| 250 | AAAAGAUGUUGUGUC | HMOX1\|CD80 | |
| 251 | AAAGAUGUUGUGUC | HMOX1\|CD80 | |
| 252 | UGUCCUGCUUCUAA | HMOX1\|CD80 | |
| 253 | UGUCCUGCUUCUAAA | HMOX1\|CD80 | |
| 254 | CCAGCCACAAGGCUG | HMOX1\|CD86 | |
| 255 | CAAGAGCAGGCAGGG | HMOX1\|PDCD1LG2 | |
| 256 | GCAAGAGCAGGCAGG | HMOX1\|PDCD1LG2 | |
| 257 | GCAAGAGCAGGCAGGG | HMOX1\|PDCD1LG2 | |
| 258 | GCAGGUGAGGGAACU | HMOX1\|PDCD1LG2 | |
| 259 | AACAUCAGCGUGGG | HMOX1\|VTCN1 | |
| 260 | UUGUUCAUUGGCUUA | PDCD1LG2\|IDO1 | |
| 261 | UCCUUCCUGGGUGGG | PDCD1\|LGALS9 | |
| 262 | CACCAGUGUUCUGC | PDCD1\|PDCD1LG2 | |
| 263 | GGAAAAGGGUUGAG | PDCD1\|PDCD1LG2 | |
| 264 | AGGCCCUUUGUGGG | PDCD1\|VTCN1 | |
| 265 | CAGGCCCUUUGUGG | PDCD1\|VTCN1 | |
| 266 | CAGGCCCUUUGUGGG | PDCD1\|VTCN1 | |
| 267 | CUCUGAAGCAUCUUU | PDCD1\|VTCN1 | |
| 268 | CUGUGAAGCGCUUG | TNFRSF14\|IDO1 | |
| 269 | ACAGGGAGCCUGCCC | TNFRSF14\|VTCN1 | |
| 270 | CUGGGGGCAGGGCCUG | TNFRSF14\|VTCN1 | |
| 271 | GGGCCAGCUCUGUGG | TNFRSF14\|VTCN1 | |
| 272 | GGGCCAGCUCUGUGGG | TNFRSF14\|VTCN1 | |
| 273 | AUCAAGUCCUGAGU | VTCN1\|CD274 | |
| 274 | AUCAAGUCCUGAGUG | VTCN1\|CD274 | |
| 275 | CAUCAAGUCCUGAGU | VTCN1\|CD274 | |
| 276 | CAUCAAGUCCUGAGUG | VTCN1\|CD274 | |
| 277 | CCAUCAAGUCCUGAG | VTCN1\|CD274 | |
| 278 | CCAUCAAGUCCUGAGU | VTCN1\|CD274 | |
| 279 | CCAUCAAGUCCUGAGUG | VTCN1\|CD274 | |
| 280 | UCAAGUCCUGAGUG | VTCN1\|CD274 | |
| 281 | CUCUUCUGAAAAUGC | VTCN1\|IDO1 | |
| 282 | CUCUUCUGAAAAUGCA | VTCN1\|IDO1 | |
| 283 | CUCUUCUGAAAAUGCAA | VTCN1\|IDO1 | |
| 284 | CUCUUCUGAAAAUGCAAA | VTCN1\|IDO1 | |
| 285 | CUUCUGAAAAUGCAA | VTCN1\|IDO1 | |
| 286 | CUUCUGAAAAUGCAAA | VTCN1\|IDO1 | |
| 287 | GUUUCCAGACAGGU | VTCN1\|IDO1 | |
| 288 | UCUUCUGAAAAUGCAA | VTCN1\|IDO1 | |
| 289 | UCUUCUGAAAAUGCAAA | VTCN1\|IDO1 | |
| 290 | UUCUCAUAGCCAUCC | VTCN1\|IDO1 | |
| 291 | ACUCCUGGGUGGCAG | VTCN1\|LGALS9 | |
| 292 | AGGCCAAUGAGGCA | VTCN1\|LGALS9 | |
| 293 | AGGCCAAUGAGGCAG | VTCN1\|LGALS9 | |
| 294 | AGGCCAAUGAGGCAGU | VTCN1\|LGALS9 | |
| 295 | CCAACAUCUAAAAG | VTCN1\|LGALS9 | |
| 296 | GCCAAUGAGGCAGU | VTCN1\|LGALS9 | |
| 297 | GGCCAAUGAGGCAGU | VTCN1\|LGALS9 | |
| 298 | AAACAAAAAGAAGCCA | VTCN1\|PDCD1LG2 | |
| 299 | AAGGUUUCCAGACAG | VTCN1\|PDCD1LG2 | |
| 300 | AAGGUUUCCAGACAGG | VTCN1\|PDCD1LG2 | |
| 301 | ACAUUCUGCCUCAGA | VTCN1\|PDCD1LG2 | |
| 302 | ACGUAUACACCAUA | VTCN1\|PDCD1LG2 | |
| 303 | ACGUAUACACCAUAG | VTCN1\|PDCD1LG2 | |
| 304 | ACGUAUACACCAUAGA | VTCN1\|PDCD1LG2 | |
| 305 | ACGUAUACACCAUAGAA | VTCN1\|PDCD1LG2 | |
| 306 | ACGUAUACACCAUAGAAU | VTCN1\|PDCD1LG2 | |
| 307 | ACGUAUACACCAUAGAAUA | VTCN1\|PDCD1LG2 | |
| 308 | ACGUAUACACCAUAGAAUAC | VTCN1\|PDCD1LG2 | |
| 309 | ACUGAUCUGGACUC | VTCN1\|PDCD1LG2 | |
| 310 | ACUGAUCUGGACUCA | VTCN1\|PDCD1LG2 | |
| 311 | AGAAAUAACUUCCUU | VTCN1\|PDCD1LG2 | |
| 312 | AGGAUUUCAAAAAUC | VTCN1\|PDCD1LG2 | |
| 313 | AGGGUCCACUGUUG | VTCN1\|PDCD1LG2 | |
| 314 | AGGUUUCCAGACAGG | VTCN1\|PDCD1LG2 | |
| 315 | AGUCCUCAGAGGCA | VTCN1\|PDCD1LG2 | |
| 316 | AUCCAAAACUACCC | VTCN1\|PDCD1LG2 | |
| 317 | CACGUAUACACCAUA | VTCN1\|PDCD1LG2 | |
| 318 | CACGUAUACACCAUAG | VTCN1\|PDCD1LG2 | |
| 319 | CACGUAUACACCAUAGA | VTCN1\|PDCD1LG2 | |
| 320 | CACGUAUACACCAUAGAA | VTCN1\|PDCD1LG2 | |
| 321 | CACGUAUACACCAUAGAAU | VTCN1\|PDCD1LG2 | |
| 322 | CACGUAUACACCAUAGAAUA | VTCN1\|PDCD1LG2 | |
| 323 | CAUUCUGCCUCAGA | VTCN1\|PDCD1LG2 | |
| 324 | CGUAUACACCAUAG | VTCN1\|PDCD1LG2 | |
| 325 | CGUAUACACCAUAGA | VTCN1\|PDCD1LG2 | |
| 326 | CGUAUACACCAUAGAA | VTCN1\|PDCD1LG2 | |
| 327 | CGUAUACACCAUAGAAU | VTCN1\|PDCD1LG2 | |
| 328 | CGUAUACACCAUAGAAUA | VTCN1\|PDCD1LG2 | |
| 329 | CGUAUACACCAUAGAAUAC | VTCN1\|PDCD1LG2 | |
| 330 | CGUAUACACCAUAGAAUACU | VTCN1\|PDCD1LG2 | |
| 331 | CUAAAGUGCAAUGC | VTCN1\|PDCD1LG2 | |
| 332 | CUGAUCUGGACUCA | VTCN1\|PDCD1LG2 | |
| 333 | GAUAACAUCUCUCA | VTCN1\|PDCD1LG2 | |
| 334 | GAUAACAUCUCUCAG | VTCN1\|PDCD1LG2 | |
| 335 | GCACGUAUACACCAUA | VTCN1\|PDCD1LG2 | |
| 336 | GCACGUAUACACCAUAG | VTCN1\|PDCD1LG2 | |
| 337 | GCACGUAUACACCAUAGA | VTCN1\|PDCD1LG2 | |
| 338 | GCACGUAUACACCAUAGAA | VTCN1\|PDCD1LG2 | |
| 339 | GCACGUAUACACCAUAGAAU | VTCN1\|PDCD1LG2 | |
| 340 | GGCACGUAUACACCAUA | VTCN1\|PDCD1LG2 | |
| 341 | GGCACGUAUACACCAUAG | VTCN1\|PDCD1LG2 | |
| 342 | GGCACGUAUACACCAUAGA | VTCN1\|PDCD1LG2 | |
| 343 | GGCACGUAUACACCAUAGAA | VTCN1\|PDCD1LG2 | |
| 344 | GUAUACACCAUAGAAUA | VTCN1\|PDCD1LG2 | |
| 345 | GUAUACACCAUAGAAUAC | VTCN1\|PDCD1LG2 | |
| 346 | GUAUACACCAUAGAAUACU | VTCN1\|PDCD1LG2 | |
| 347 | GUAUACACCAUAGAAUACUA | VTCN1\|PDCD1LG2 | |
| 348 | GUGGCACGUAUACACCAUA | VTCN1\|PDCD1LG2 | |
| 349 | GUGGCACGUAUACACCAUAG | VTCN1\|PDCD1LG2 | |
| 350 | UAACAAAUGCAUAGU | VTCN1\|PDCD1LG2 | |
| 351 | UAUGUUUUCUGAAUUU | VTCN1\|PDCD1LG2 | |
| 352 | UGGCACGUAUACACCAUA | VTCN1\|PDCD1LG2 | |
| 353 | UGGCACGUAUACACCAUAG | VTCN1\|PDCD1LG2 | |
| 354 | UGGCACGUAUACACCAUAGA | VTCN1\|PDCD1LG2 | |
| 355 | UGUAACACUCAGGU | VTCN1\|PDCD1LG2 | |
| 356 | UGUGGCACGUAUACACCAUA | VTCN1\|PDCD1LG2 | |
| 357 | UUAACAAAUGCAUAGU | VTCN1\|PDCD1LG2 | |
| 358 | UUUAACAAAUGCAUAG | VTCN1\|PDCD1LG2 | |
| 359 | UUUAACAAAUGCAUAGU | VTCN1\|PDCD1LG2 | |
| 360 | UUUUAACAAAUGCAUAG | VTCN1\|PDCD1LG2 | |
| 361 | UUUUAACAAAUGCAUAGU | VTCN1\|PDCD1LG2 | |
| 362 | GUACAAUUGCUCCAUUU | IDO1\|PDCD1LG2 | CRM0140 |
| 363 | CUUCCGUAUUCCUCAGU | CD274\|CTLA4 | CRM0141 |
| 364 | AAUUUUGUCGCCAAACU | CD274\|PDCD1LG2 | CRM0142 |
| 365 | ACCCUCUAGUGUUCCUG | PDCD1\|PDCD1LG2 | CRM0143 |
| 366 | CUUCCGUAUUCCUCAUG | CD274\|CTLA4 | CRM0144 |
| 367 | UUCACUUUCCCUGUAGG | CD274\|PDCD1LG2 | CRM0145 |
| 368 | AACAGUAUCUUAAGG | CD274\|IDO1\| | CRM0146 |
| | | PDCD1LG2 | |
| 369 | GGGCUGGACGUGCAG | IDO1\|PDCD1\| | CRM0147 |
| | | PDCD1LG2 | |
| 370 | CAACAAAAUCAACCAAAG | CD274\|PDCD1LG2 | CRM0148 |
| 371 | AGCUAGAUGCACUGUC | IDO1\|PDCD1LG2 | CRM0149 |
| 372 | UGACUUCCGUAUUCCUC | CD274\|CTLA4 | CRM0150 |
| 373 | CUCUCUCAUCAACCCAC | PDCD1\|PDCD1LG2 | CRM0151 |
| 374 | AACAUCUACCUCGCAGA | IDO1\|PDCD1LG2 | CRM0152 |
| 375 | GGCUUCCGUAUUCCUCA | CD274\|CTLA4 | CRM0153 |

TABLE 2.2

| SEQ | | | |
|---|---|---|---|
| ID | target sequence | | |
| NO | (5′-3′) | targets | oligoID |
| 1655 | AAAAAGAAAAGGAAAGGG | VSIR\|PDCD1LG2 | |
| 1656 | AAAAUCAAGGUGACAGC | HAVCR2\|KIR2DL1\| | |
| | | KIR2DL3 | |
| 1657 | AAAGCCCUCAGAAUC | KIR2DL3\|TIGIT | |
| 1658 | AAAGCCCUCAGAAUCC | KIR2DL3\|TIGIT | |
| 1659 | AAAGGAUGUAUCAGU | CD274\|VSIR | |
| 1660 | AAAGGAUGUAUCAGUU | CD274\|VSIR | |
| 1661 | AAAGUGAGUGAAGUG | VTCN1\|VSIR | |
| 1662 | AAAGUGAGUGAAGUGG | VTCN1\|VSIR | |
| 1663 | AACCUGCAGCAGGU | NT5E\|VTCN1 | |
| 1664 | AAGAAAACAACUCUG | NT5E\|PDCD1LG2 | |
| 1665 | AAGCCCUCAGAAUC | NT5E\|KIR2DL3\| | |
| | | TIGIT | |
| 1666 | AAGCCCUCAGAAUCC | KIR2DL3\|TIGIT | |
| 1667 | AAGGAAGAGGCUCUGC | PDCD1\|KIR2DL3 | |
| 1668 | AAGGAUGUAUCAGU | CD274\|VSIR | |
| 1669 | AAGGAUGUAUCAGUU | CD274\|VSIR | |
| 1670 | AAGGGGCAGAGGUGU | NT5E\|VSIR | |
| 1671 | AAGGGGCCCAGGACC | NT5E\|CD276 | |
| 1672 | AAGGGGCCCAGGACCA | NT5E\|CD276 | |
| 1673 | AAGGGGCCCAGGACCAC | NT5E\|CD276 | |
| 1674 | AAGUGAGUGAAGUGG | VTCN1\|VSIR | |
| 1675 | AAUAACAAAGAAUUAU | VTCN1\|TIGIT | |
| 1676 | AAUAUGUGUAAUGAAU | NT5E\|PDCD1LG2 | |
| 1677 | AAUCUUUUCCCUGGA | HAVCR2\|TDO2 | |
| 1678 | AAUCUUUUCCCUGGAA | HAVCR2\|TDO2 | |
| 1679 | AAUGAUAAAGUUAC | NT5E\|CD274 | |
| 1680 | AAUUCAUAAAAAUAC | VTCN1\|TDO2 | |
| 1681 | ACAUAGGAGCAUGG | NT5E\|CD276 | |
| 1682 | ACAUAGGAGCAUGGC | NT5E\|CD276 | |
| 1683 | ACAUAGGAGCAUGGCA | NT5E\|CD276 | |
| 1684 | ACCAGCAACUGAAG | PDCD1LG2\|TIGIT | |
| 1685 | ACCAGUCCAAGGCC | CD86\|TIGIT | |
| 1686 | AGAAAUGACUUUGAA | NT5E\|CD86 | |
| 1687 | AGAACAUGCAUUUUG | CEACAM1\|VSIR | |
| 1688 | AGAACAUGCAUUUUGG | CEACAM1\|VSIR | |
| 1689 | AGACACACGGAUGA | NT5E\|CD86 | |
| 1690 | AGACGGCACAGGCC | VSIR\|LGALS9 | |
| 1691 | AGACGGCACAGGCCA | VSIR\|LGALS9 | |
| 1692 | AGAGAAAAGGAAGAAAG | CEACAM1\|NT5E | |
| 1693 | AGAGAUGUCCAAGC | CD86\|VSIR | |
| 1694 | AGCAAAGAGAAGAUA | HAVCR2\|PDCD1LG2 | |
| 1695 | AGCCAUGGGUGUGAU | NT5E\|TNFRSF14 | |
| 1696 | AGCCAUGGGUGUGAUG | NT5E\|TNFRSF14 | |
| 1697 | AGCCAUGGGUGUGAUGA | NT5E\|TNFRSF14 | |
| 1698 | AGCCCACAGCCCAGA | VTCN1\|VSIR | |
| 1699 | AGCUCCUAUGACAU | KIR2DL1\|KIR2DL3\| | |
| | | TDO2 | |
| 1700 | AGCUCCUCACAGGCA | PDCD1LG2\|TDO2 | |
| 1701 | AGCUCCUCACAGGCAA | PDCD1LG2\|TDO2 | |
| 1702 | AGGAAAUCUGAUGCU | HAVCR2\|CD276 | |
| 1703 | AGGAUAAAAUUGGAU | NT5E\|CD86 | |
| 1704 | AGGAUGUAUCAGUU | CD274\|VSIR | |
| 1705 | AGGCAGAGCUGGAGGC | NT5E\|PDCD1 | |
| 1706 | AGGGGCCCAGGACCA | NT5E\|CD276 | |
| 1707 | AGGGGCCCAGGACCAC | NT5E\|CD276 | |
| 1708 | AGGGGGCUCCUGCC | LAG3\|CD276 | |
| 1709 | AGUGGGGUUACAUA | VTCN1\|VSIR | |
| 1710 | AGUGGGGUUACAUAA | VTCN1\|VSIR | |
| 1711 | AGUGGGGUUACAUAAC | VTCN1\|VSIR | |
| 1712 | AGUGGGGUUACAUAACU | VTCN1\|VSIR | |
| 1713 | AGUGGGGUUACAUAACUG | VTCN1\|VSIR | |
| 1714 | AGUGUAGUCACAGG | CD86\|KIR2DL1 | |
| 1715 | AGUUUGAAGUAUUCC | VTCN1\|TDO2 | |
| 1716 | AUAAACAAAAUAAUGUA | NT5E\|VTCN1 | |
| 1717 | AUAAAUGUUUGCCG | NT5E\|VTCN1 | |
| 1718 | AUAGGAGCAUGGCA | NT5E\|CD276 | |
| 1719 | AUAUGAUCAAUUGA | PDCD1LG2\|TDO2 | |
| 1720 | AUAUGAUCAAUUGAU | PDCD1LG2\|TDO2 | |
| 1721 | AUAUGUGUAAUGAAU | NT5E\|PDCD1LG2 | |
| 1722 | AUCCAAUAUACAAA | NT5E\|CD80 | |
| 1723 | AUCCUCUUGGCAUG | VTCN1\|TDO2 | |
| 1724 | AUCUUUUCCCUGGAA | HAVCR2\|TDO2 | |
| 1725 | AUGACCUCCAGGUUC | NT5E\|VTCN1 | |
| 1726 | AUGAGUAUGAGUAA | CD86\|TDO2 | |
| 1727 | AUGGAUAUAAGAUAU | CD86\|KIR2DL1\| | |
| | | KIR2DL3 | |
| 1728 | AUGUGGGGAGGGGGU | CEACAM1\|CD80 | |
| 1729 | AUGUGGGGAGGGGGUU | CEACAM1\|CD80 | |
| 1730 | AUUACCCAUUUCCCA | KIR2DL3\|CD274 | |
| 1731 | AUUACCCAUUUCCCAG | KIR2DL3\|CD274 | |
| 1732 | AUUCUCUAGAGAGU | VTCN1\|VSIR | |
| 1733 | AUUGUACAAGGAAAA | NT5E\|CD80 | |
| 1734 | AUUGUACAAGGAAAAU | NT5E\|CD80 | |
| 1735 | AUUGUACAAGGAAAAUU | NT5E\|CD80 | |
| 1736 | AUUGUACAAGGAAAAUUA | NT5E\|CD80 | |
| 1737 | AUUGUACAAGGAAAAUUAG | NT5E\|CD80 | |
| 1738 | AUUUGAGGCAAGAGA | KIR2DL1\|PDCD1LG2 | |
| 1739 | AUUUGUAAAUGUAUAU | HAVCR2\|VTCN1 | |
| 1740 | CAAAUGUCUAAGGU | CD80\|KIR2DL1\| | |
| | | KIR2DL3 | |
| 1741 | CAGAGCUGAGGUCAA | CEACAM1\|CD86 | |
| 1742 | CAGCCACAGAAAGAA | HAVCR2\|VTCN1 | |
| 1743 | CAGGGCUAGAUUGU | CEACAM1\|NT5E | |
| 1744 | CAUAAACAAAAUAAUG | NT5E\|VTCN1 | |
| 1745 | CAUAAACAAAAUAAUGU | NT5E\|VTCN1 | |
| 1746 | CAUAAACAAAAUAAUGUA | NT5E\|VTCN1 | |
| 1747 | CAUAGGAGCAUGGC | NT5E\|CD276 | |
| 1748 | CAUAGGAGCAUGGCA | NT5E\|CD276 | |
| 1749 | CAUGGGUGUGAUGA | NT5E\|TNFRSF14 | |
| 1750 | CCAAAAACAUUAAAA | NT5E\|HAVCR2 | |
| 1751 | CCAAGCCCUCAGAA | NT5E\|VSIR | |
| 1752 | CCACACCCACACACACC | CD86\|VSIR | |
| 1753 | CCAGGGCCCAAUAU | CEACAM1\|KIR2DL3 | |
| 1754 | CCAUGGGUGUGAUG | NT5E\|TNFRSF14 | |
| 1755 | CCAUGGGUGUGAUGA | NT5E\|TNFRSF14 | |
| 1756 | CCCAAAAACAUUAA | NT5E\|HAVCR2 | |
| 1757 | CCCAAAAACAUUAAA | NT5E\|HAVCR2 | |
| 1758 | CCCAAAAACAUUAAAA | NT5E\|HAVCR2 | |
| 1759 | CCCUUGGACACACA | NT5E\|TIGIT | |
| 1760 | CCGCGUCCAGCUGG | LAG3\|HMOX1 | |
| 1761 | CCUCUGAGUGGGUGG | NT5E\|CD276 | |
| 1762 | CCUGGUAGCAGCCU | CD80\|TIGIT | |
| 1763 | CGGAUGUGGGCACU | CEACAM1\|TNFRSF14 | |
| 1764 | CUCACCAAACACAA | CEACAM1\|CD86 | |
| 1765 | CUCACCAAACACAAG | CEACAM1\|CD86 | |
| 1766 | CUCAGAAAAUUAAAAAUAGA | CD80\|CD86 | |
| 1767 | CUCAGUGAGGCUGAC | CEACAM1\|VSIR | |
| 1768 | CUCCUCUGGUUGCU | NT5E\|CD86 | |
| 1769 | CUCCUGUCUGGCCCU | CD276\|VSIR | |
| 1770 | CUGACUCAGGGUGAG | CD86\|VSIR | |
| 1771 | CUGACUCAGGGUGAGA | CD86\|VSIR | |
| 1772 | CUGAGUCUGUUUCCUCAUC | CD274\|VSIR | |
| 1773 | CUGAGUCUGUUUCCUCAUCU | CD274\|VSIR | |
| 1774 | CUGCAGACAUUUGCUU | CEACAM1\|PDCD1LG2 | |
| 1775 | CUGCAUUAUCCUAU | CEACAM1\|CD276 | |
| 1776 | CUGCCAACACCAGCC | VSIR\|PDCD1LG2 | |
| 1777 | CUGCCAACACCAGCCA | VSIR\|PDCD1LG2 | |
| 1778 | CUGCCAACACCAGCCAC | VSIR\|PDCD1LG2 | |
| 1779 | CUGGGAAGUAGCAGA | CD80\|VSIR | |
| 1780 | CUGGGAAGUAGCAGAG | CD80\|VSIR | |
| 1781 | CUGGGAAGUAGCAGAGG | CD80\|VSIR | |
| 1782 | CUUCUUGCUUGGAGA | VSIR\|IDO1 | |
| 1783 | CUUGUUGGAAAGCA | NT5E\|LGALS9 | |
| 1784 | GAAAGCCCUCAGAAU | KIR2DL3\|TIGIT | |
| 1785 | GAAAGCCCUCAGAAUC | KIR2DL3\|TIGIT | |
| 1786 | GAAAGCCCUCAGAAUCC | KIR2DL3\|TIGIT | |
| 1787 | GAACAUGCAUUUUGG | CEACAM1\|VSIR | |
| 1788 | GAACCCUGGCCUUG | NT5E\|TIGIT | |
| 1789 | GAAGGAAGAGGCUCUG | PDCD1\|KIR2DL1\| | |
| | | KIR2DL3 | |
| 1790 | GAAGGAAGAGGCUCUGC | PDCD1\|KIR2DL3 | |
| 1791 | GAAUAUUCCUGUGG | NT5E\|CD80 | |
| 1792 | GACAUAGGAGCAUG | NT5E\|CD276 | |
| 1793 | GACAUAGGAGCAUGG | NT5E\|CD276 | |
| 1794 | GACAUAGGAGCAUGGC | NT5E\|CD276 | |
| 1795 | GACAUAGGAGCAUGGCA | NT5E\|CD276 | |
| 1796 | GACCCACAACACAG | HAVCR2\|PDCD1LG2 | |
| 1797 | GACGGCACAGGCCA | VSIR\|LGALS9 | |
| 1798 | GACUCAGGGUGAGA | CD86\|VSIR | |
| 1799 | GAGACAUGGCUGGUG | CD86\|TIGIT | |
| 1800 | GAGAGAAAAGGAAGAAAG | CEACAM1\|NT5E | |
| 1801 | GAGCAAGAACCGGA | LAG3\|CD80 | |
| 1802 | GAGGAUAAAAUUGGA | NT5E\|CD86 | |
| 1803 | GAGGAUAAAAUUGGAU | NT5E\|CD86 | |
| 1804 | GAGGCACUCUCAGG | CEACAM1\|VSIR | |
| 1805 | GAGGGGUAGAGGCC | NT5E\|VTCN1 | |
| 1806 | GAGUCUGUUUCCUCAUC | CD274\|VSIR | |
| 1807 | GAGUCUGUUUCCUCAUCU | CD274\|VSIR | |
| 1808 | GAUAGAUCUGAGGC | PDCD1LG2\|TIGIT | |
| 1809 | GAUCAUCAGUGAGU | NT5E\|VSIR | |
| 1810 | GAUGAGUAUGAGUA | CD86\|TDO2 | |
| 1811 | GAUGAGUAUGAGUAA | CD86\|TDO2 | |
| 1812 | GAUGGCCUGGGGAA | NT5E\|CD86 | |
| 1813 | GCAGGGCCCAGCAGGG | CD276\|TIGIT | |
| 1814 | GCAGUCUUUUCCUG | NT5E\|CD276 | |
| 1815 | GCAUAAACAAAAUAAU | NT5E\|VTCN1 | |
| 1816 | GCAUAAACAAAAUAAUG | NT5E\|VTCN1 | |
| 1817 | GCAUAAACAAAAUAAUGU | NT5E\|VTCN1 | |
| 1818 | GCAUAAACAAAAUAAUGUA | NT5E\|VTCN1 | |
| 1819 | GCAUCUAGUGCAGG | CEACAM1\|VSIR | |
| 1820 | GCCAACACCAGCCAC | VSIR\|PDCD1LG2 | |
| 1821 | GCCAGGAGGGCAAAG | NT5E\|LGALS9 | |
| 1822 | GCCAUGGGUGUGAU | NT5E\|TNFRSF14 | |
| 1823 | GCCAUGGGUGUGAUG | NT5E\|TNFRSF14 | |
| 1824 | GCCAUGGGUGUGAUGA | NT5E\|TNFRSF14 | |
| 1825 | GCCAUUUCAACCAU | VSIR\|PDCD1LG2 | |
| 1826 | GCUCCCUUAAUCCA | HAVCR2\|TIGIT | |
| 1827 | GCUCCCUUAAUCCAG | HAVCR2\|TIGIT | |
| 1828 | GCUCCUCACAGGCAA | PDCD1LG2\|TDO2 | |
| 1829 | GCUCCUUCUCUACCC | LAG3\|HAVCR2 | |
| 1830 | GCUCUUCUCCUCUCC | CD276\|TDO2 | |
| 1831 | GCUGCAUUAUCCUA | CEACAM1\|CD276 | |
| 1832 | GCUGCAUUAUCCUAU | CEACAM1\|CD276 | |
| 1833 | GCUGGGAAGUAGCAG | CD80\|VSIR | |
| 1834 | GCUGGGAAGUAGCAGA | CD80\|VSIR | |
| 1835 | GCUGGGAAGUAGCAGAG | CD80\|VSIR | |
| 1836 | GCUGGGAAGUAGCAGAGG | CD80\|VSIR | |
| 1837 | GCUUUGGCGUGGGA | NT5E\|PDCD1 | |
| 1838 | GGACCUGGGGUCAA | HMOX1\|VSIR | |
| 1839 | GGAGAAUGGUAGUG | CD276\|VSIR | |
| 1840 | GGAGUAAAUGUUUUU | CD276\|TDO2 | |
| 1841 | GGAGUCUCUUACUC | CD80\|KIR2DL1 | |
| 1842 | GGAUAAAAUUGGAU | NT5E\|CD86 | |
| 1843 | GGAUCCCUGGGGAAG | CEACAM1\|LAG3 | |
| 1844 | GGCAGUCUUUUCCUG | NT5E\|CD276 | |
| 1845 | GGCAUGAAAAUGGG | CD276\|VSIR | |
| 1846 | GGCAUGAAAAUGGGC | CD276\|VSIR | |
| 1847 | GGGAAGUAGCAGAGG | CD80\|VSIR | |
| 1848 | GGGACUCGGAGGGA | CD276\|VSIR | |
| 1849 | GGGAGGAGCUGGGGUC | TNFRSF14\|VSIR | |
| 1850 | GGGCAGUCUUUUCC | NT5E\|CD276 | |
| 1851 | GGGCAGUCUUUUCCU | NT5E\|CD276 | |
| 1852 | GGGCAGUCUUUUCCUG | NT5E\|CD276 | |
| 1853 | GGGGCCCAGGACCAC | NT5E\|CD276 | |
| 1854 | GGGGUUACAUAACU | VTCN1\|VSIR | |
| 1855 | GGGGUUACAUAACUG | VTCN1\|VSIR | |
| 1856 | GGGUUACAUAACUG | VTCN1\|VSIR | |
| 1857 | GGGUUCCUCUUUUUA | CEACAM1\|CD80 | |
| 1858 | GGUAAGAAUAUCAG | CEACAM1\|CD274 | |
| 1859 | GGUGCACACCCAGG | HMOX1\|NT5E | |
| 1860 | GGUUUCACAGCCUA | TIGIT\|TDO2 | |
| 1861 | GUACAAGGAAAAUUA | NT5E\|CD80 | |
| 1862 | GUACAAGGAAAAUUAG | NT5E\|CD80 | |
| 1863 | GUAGAAGUUAUGGA | CD86\|TDO2 | |
| 1864 | GUAGGCAGAAAAAUA | CD86\|TDO2 | |
| 1865 | GUAGGCAGAAAAAUAA | CD86\|TDO2 | |
| 1866 | GUAUAAAACAAACAC | LAG3\|PDCD1LG2 | |
| 1867 | GUAUGGCUAUGGCU | VTCN1\|TIGIT | |
| 1868 | GUCCCUACCAGGAA | CD276\|KIR2DL1 | |
| 1869 | GUCCCUACCAGGAAC | CD276\|KIR2DL1 | |
| 1870 | GUCCUCAGAGGCAU | NT5E\|PDCD1LG2 | |
| 1871 | GUCCUGGUAGCAGC | CD80\|TIGIT | |
| 1872 | GUCCUGGUAGCAGCC | CD80\|TIGIT | |
| 1873 | GUCCUGGUAGCAGCCU | CD80\|TIGIT | |
| 1874 | GUCUACCUGUAGGA | CEACAM1\|VTCN1 | |
| 1875 | GUCUACCUGUAGGAU | CEACAM1\|VTCN1 | |
| 1876 | GUCUACUUUGCAGC | CEACAM1\|LAG3 | |
| 1877 | GUCUAUGGUUGUAA | CD86\|TDO2 | |
| 1878 | GUCUCUGUUGCAACA | CD80\|TIGIT | |
| 1879 | GUCUCUGUUGCAACAA | CD80\|TIGIT | |
| 1880 | GUGAUAGAACCAGAA | NT5E\|TDO2 | |
| 1881 | GUGCCCAUGAAUUU | PDCD1LG2\|TDO2 | |
| 1882 | GUGGGCGGCCUGCU | LAG3\|PDCD1 | |
| 1883 | GUGGGCGGCCUGCUG | LAG3\|PDCD1 | |
| 1884 | GUGGGCGGCCUGCUGG | LAG3\|PDCD1 | |
| 1885 | GUGGGGUUACAUAA | VTCN1\|VSIR | |
| 1886 | GUGGGGUUACAUAAC | VTCN1\|VSIR | |
| 1887 | GUGGGGUUACAUAACU | VTCN1\|VSIR | |
| 1888 | GUGGGGUUACAUAACUG | VTCN1\|VSIR | |
| 1889 | GUGUCUGGUAUUGUU | NT5E\|CD274 | |
| 1890 | GUGUCUGUCUGUUCA | NT5E\|VSIR | |
| 1891 | GUUACAGCCUAUCU | NT5E\|CD276 | |
| 1892 | GUUACAGCCUAUCUC | NT5E\|CD276 | |
| 1893 | GUUCUAAUUUCAGCU | HAVCR2\|VTCN1 | |
| 1894 | GUUGGUCAUCAAAC | HAVCR2\|PDCD1LG2 | |
| 1895 | GUUUCAAGCCAGGG | VSIR\|LGALS9 | |
| 1896 | UAAAAUCAAGGUGAC | HAVCR2\|KIR2DL1\| | |
| | | KIR2DL3 | |
| 1897 | UAAAAUCAAGGUGACA | HAVCR2\|KIR2DL1\| | |
| | | KIR2DL3 | |
| 1898 | UAAAAUCAAGGUGACAG | HAVCR2\|KIR2DL1\| | |
| | | KIR2DL3 | |
| 1899 | UAAAAUCAAGGUGACAGC | HAVCR2\|KIR2DL1\| | |
| | | KIR2DL3 | |
| 1900 | UAAACAAAAUAAUGUA | NT5E\|VTCN1 | |
| 1901 | UAAAUCCUCUCCUC | NT5E\|PDCD1LG2 | |
| 1902 | UAACUUCCCUGUGUU | VTCN1\|VSIR | |
| 1903 | UAAGAAAACAACUCU | NT5E\|PDCD1LG2 | |
| 1904 | UAAGAAAACAACUCUG | NT5E\|PDCD1LG2 | |
| 1905 | UACAAGGAAAAUUAG | NT5E\|CD80 | |
| 1906 | UACCCAUUCAUAGU | NT5E\|CD86 | |
| 1907 | UAGAGAAAUCUCCC | NT5E\|CD86 | |
| 1908 | UAUCUAAGCUGCUU | VTCN1\|VSIR | |
| 1909 | UAUCUUCAUCUGUCC | VTCN1\|TIGIT | |
| 1910 | UAUUCUAAGUGGGU | TIGIT\|TDO2 | |
| 1911 | UCACCAAACACAAG | CEACAM1\|CD86 | |
| 1912 | UCACCAGCUACAGA | VSIR\|PDCD1LG2 | |
| 1913 | UCAGAAAAUUAAAAAUAGA | CD80\|CD86 | |
| 1914 | UCAGAUUGACCCUA | NT5E\|VTCN1 | |
| 1915 | UCCACACCCACACACA | CD86\|VSIR | |
| 1916 | UCCACACCCACACACAC | CD86\|VSIR | |
| 1917 | UCCACACCCACACACACC | CD86\|VSIR | |
| 1918 | UCCCUACCAGGAAC | CD276\|KIR2DL1 | |
| 1919 | UCCUGACCCUGCCCU | CD276\|VSIR | |
| 1920 | UCCUGGUAGCAGCC | CD80\|TIGIT | |
| 1921 | UCCUGGUAGCAGCCU | CD80\|TIGIT | |
| 1922 | UCCUGGUCUCUUCUA | HAVCR2\|TDO2 | |
| 1923 | UCUAAUCACCUCCA | NT5E\|VTCN1 | |
| 1924 | UCUACCUGUAGGAU | CEACAM1\|VTCN1 | |
| 1925 | UCUCAAGUUGGAUG | NT5E\|CD80 | |
| 1926 | UCUCACUUCAGUCC | VTCN1\|TIGIT | |
| 1927 | UCUCCAUCAGUCGC | KIR2DL1\|PDCD1LG2 | |
| 1928 | UCUCCUGUCUGGCCC | CD276\|VSIR | |
| 1929 | UCUCCUGUCUGGCCCU | CD276\|VSIR | |
| 1930 | UCUUCUAUUCUUUAG | VTCN1\|TDO2 | |
| 1931 | UCUUUUUCAGAAACUA | HAVCR2\|IDO1 | |
| 1932 | UGAAGCACACAGACA | NT5E\|LGALS9 | |
| 1933 | UGAAUAUUCCUGUGG | NT5E\|CD80 | |
| 1934 | UGAAUGCCUGCUCCA | CEACAM1\|CD276 | |
| 1935 | UGACUCAGGGUGAGA | CD86\|VSIR | |
| 1936 | UGAGUCUGUUUCCUCAUC | CD274\|VSIR | |
| 1937 | UGAGUCUGUUUCCUCAUCU | CD274\|VSIR | |
| 1938 | UGCAGACAUUUGCUU | CEACAM1\|PDCD1LG2 | |
| 1939 | UGCCAACACCAGCC | VSIR\|PDCD1LG2 | |
| 1940 | UGCCAACACCAGCCA | VSIR\|PDCD1LG2 | |
| 1941 | UGCCAACACCAGCCAC | VSIR\|PDCD1LG2 | |
| 1942 | UGCUGCAUUAUCCUA | CEACAM1\|CD276 | |
| 1943 | UGCUGCAUUAUCCUAU | CEACAM1\|CD276 | |
| 1944 | UGCUGGGCCCACAUU | KIR2DL1\|LGALS9 | |
| 1945 | UGGACUGAGCCUCAG | NT5E\|VSIR | |
| 1946 | UGGCAUGAAAAUGGG | CD276\|VSIR | |
| 1947 | UGGCAUGAAAAUGGGC | CD276\|VSIR | |
| 1948 | UGGGAAGUAGCAGAG | CD80\|VSIR | |
| 1949 | UGGGAAGUAGCAGAGG | CD80\|VSIR | |
| 1950 | UGGGCGGCCUGCUG | LAG3\|PDCD1 | |
| 1951 | UGGGCGGCCUGCUGG | LAG3\|PDCD1 | |
| 1952 | UGGGGUUACAUAAC | VTCN1\|VSIR | |
| 1953 | UGGGGUUACAUAACU | VTCN1\|VSIR | |
| 1954 | UGGGGUUACAUAACUG | VTCN1\|VSIR | |
| 1955 | UGGGUGGUGGGAAUA | VTCN1\|TDO2 | |
| 1956 | UGGGUUCCUCUUUUU | CEACAM1\|CD80 | |
| 1957 | UGGGUUCCUCUUUUUA | CEACAM1\|CD80 | |
| 1958 | UGUACAAGGAAAAUU | NT5E\|CD80 | |
| 1959 | UGUACAAGGAAAAUUA | NT5E\|CD80 | |
| 1960 | UGUACAAGGAAAAUUAG | NT5E\|CD80 | |
| 1961 | UGUAGGCAGAAAAAU | CD86\|TDO2 | |
| 1962 | UGUAGGCAGAAAAAUA | CD86\|TDO2 | |
| 1963 | UGUAGGCAGAAAAAUAA | CD86\|TDO2 | |
| 1964 | UGUAUGGCUAUGGC | VTCN1\|TIGIT | |
| 1965 | UGUAUGGCUAUGGCU | VTCN1\|TIGIT | |
| 1966 | UGUGUCUGUCUGUUCA | NT5E\|VSIR | |
| 1967 | UUACAGCCUAUCUC | NT5E\|CD276 | |
| 1968 | UUCCUCACCUCUCUCC | PDCD1\|KIR2DL1\| | |
| | | KIR2DL3 | |
| 1969 | UUCCUCAGAAAAUUAAAAAU | CD80\|CD86 | |
| 1970 | UUCUCACUUCAGUCC | VTCN1\|TIGIT | |
| 1971 | UUCUUCUAUUCUUUAG | VTCN1\|TDO2 | |
| 1972 | UUGCAAGGGUGCCA | VSIR\|PDCD1LG2 | |
| 1973 | UUGCUGCAUUAUCCU | CEACAM1\|CD276 | |
| 1974 | UUGCUGCAUUAUCCUA | CEACAM1\|CD276 | |
| 1975 | UUGCUGCAUUAUCCUAU | CEACAM1\|CD276 | |
| 1976 | UUGGACUGAGCCUC | NT5E\|VSIR | |
| 1977 | UUGGACUGAGCCUCA | NT5E\|VSIR | |
| 1978 | UUGGACUGAGCCUCAG | NT5E\|VSIR | |
| 1979 | UUGGGUUCCUCUUUU | CEACAM1\|CD80 | |
| 1980 | UUGGGUUCCUCUUUUU | CEACAM1\|CD80 | |
| 1981 | UUGGGUUCCUCUUUUUA | CEACAM1\|CD80 | |
| 1982 | UUGUACAAGGAAAAU | NT5E\|CD80 | |
| 1983 | UUGUACAAGGAAAAUU | NT5E\|CD80 | |
| 1984 | UUGUACAAGGAAAAUUA | NT5E\|CD80 | |
| 1985 | UUGUACAAGGAAAAUUAG | NT5E\|CD80 | |
| 1986 | UUUCUUCUAUUCUUUA | VTCN1\|TDO2 | |
| 1987 | UUUCUUCUAUUCUUUAG | VTCN1\|TDO2 | |
| 1988 | UUUGGACUGAGCCUC | NT5E\|VSIR | |
| 1989 | UUUGGACUGAGCCUCA | NT5E\|VSIR | |
| 1990 | UUUGGACUGAGCCUCAG | NT5E\|VSIR | |
| 1991 | UUUGGGUUCCUCUUU | CEACAM1\|CD80 | |
| 1992 | UUUGGGUUCCUCUUUU | CEACAM1\|CD80 | |
| 1993 | UUUGGGUUCCUCUUUUU | CEACAM1\|CD80 | |
| 1994 | UUUGGGUUCCUCUUUUUA | CEACAM1\|CD80 | |
| 1995 | UUUUCUUCUAUUCUUUA | VTCN1\|TDO2 | |
| 1996 | UUUUCUUCUAUUCUUUAG | VTCN1\|TDO2 | |
| 1997 | UUUUGGGUUCCUCUU | CEACAM1\|CD80 | |
| 1998 | UUUUGGGUUCCUCUUU | CEACAM1\|CD80 | |
| 1999 | UUUUGGGUUCCUCUUUU | CEACAM1\|CD80 | |
| 2000 | UUUUGGGUUCCUCUUUUU | CEACAM1\|CD80 | |
| 2001 | UUUUGGGUUCCUCUUUUUA | CEACAM1\|CD80 | |

[0158] LNA-modified ASOs were designed against each of the target sites listed above in Table 2.1 and Table 2.2 (see below in Table 3.1: SEQ ID NOs: 376-1475; and Table 3.2: SEQ ID NOs: 2002-3043; LNA shown in uppercase, DNA lowercase).

TABLE 3.1

| SEQ | Oligonucleotide | | |
|---|---|---|---|
| ID NO | (5′-3′) | targets | oligoID |
| 376 | AGATtatgactGAT | CD274\|IDO1 | |
| 377 | AGAttatgacTGAT | CD274\|IDO1 | CRM0193 |
| 378 | AGATtatgacTGAT | CD274\|IDO1 | |
| 379 | GGGTcaggagaATG | CD274\|PDCD1LG2 | |
| 380 | GGGtcaggagaaTG | CD274\|PDCD1LG2 | |
| 381 | GGGTcaggagAATG | CD274\|PDCD1LG2 | |
| 382 | CAAagaaggcaTGGA | CD274\|PDCD1LG2 | CRM0196 |
| 383 | CAAAgaaggcaTGGA | CD274\|PDCD1LG2 | |
| 384 | CAAAgaaggcatGGA | CD274\|PDCD1LG2 | |
| 385 | TGAcacttttTATC | CD276\|CD274 | |
| 386 | TGACacttttTATC | CD276\|CD274 | |
| 387 | TGACactttttATC | CD276\|CD274 | |
| 388 | GCTTcatatcCTCT | CD276\|CD86 | |
| 389 | GCttcatatcctCT | CD276\|CD86 | |
| 390 | GCTtcatatccTCT | CD276\|CD86 | |
| 391 | GAagatcagttCCT | CD276\|CD86 | |
| 392 | GAAGatcagtTCCT | CD276\|CD86 | |
| 393 | GAAGatcagttCCT | CD276\|CD86 | |
| 394 | TTcctaggagccTG | CD276\|CD86 | |
| 395 | TTCctaggagcCTG | CD276\|CD86 | |
| 396 | TTCctaggagCCTG | CD276\|CD86 | |
| 397 | AGAgaagaacTCTC | CD276\|CD86 | |
| 398 | AGAGaagaactCTC | CD276\|CD86 | |
| 399 | AGAGaagaacTCTC | CD276\|CD86 | |
| 400 | AGAAgggcttgGGC | CD276\|CD86 | |
| 401 | AGAagggcttggGC | CD276\|CD86 | |
| 402 | AGaagggcttggGC | CD276\|CD86 | |
| 403 | AGaagggcttggGCC | CD276\|CD86 | |
| 404 | AGAagggcttgggCC | CD276\|CD86 | |
| 405 | AGaagggcttgggCC | CD276\|CD86 | |
| 406 | AAGggcttgggcCC | CD276\|CD86 | |
| 407 | AAgggcttgggcCC | CD276\|CD86 | |
| 408 | AAgggcttgggCCC | CD276\|CD86 | |
| 409 | GAagggcttgggcCC | CD276\|CD86 | |
| 410 | GAAgggcttgggcCC | CD276\|CD86 | |
| 411 | GAagggcttgggCCC | CD276\|CD86 | |
| 412 | AGAagggcttgggcCC | CD276\|CD86 | |
| 413 | AGaagggcttgggCCC | CD276\|CD86 | |
| 414 | AGaagggcttgggcCC | CD276\|CD86 | |
| 415 | GCtggccagaggCAA | CD276\|CD86 | |
| 416 | GCtggccagaggcAA | CD276\|CD86 | |
| 417 | GCTggccagaggcAA | CD276\|CD86 | |
| 418 | GGATtataaaCCTT | CD276\|PDCD1LG2 | |
| 419 | GGAttataaaCCTT | CD276\|PDCD1LG2 | |
| 420 | GGATtataaacCTT | CD276\|PDCD1LG2 | |
| 421 | GATTataaacctTAC | CD276\|PDCD1LG2 | |
| 422 | GATtataaaccTTAC | CD276\|PDCD1LG2 | |
| 423 | GATTataaaccTTAC | CD276\|PDCD1LG2 | |
| 424 | GGATtataaaccTTAC | CD276\|PDCD1LG2 | |
| 425 | GGATtataaacctTAC | CD276\|PDCD1LG2 | |
| 426 | GGAttataaaccTTAC | CD276\|PDCD1LG2 | |
| 427 | GATtataaacCTTA | CD276\|PDCD1LG2 | |
| 428 | GATTataaaccTTA | CD276\|PDCD1LG2 | |
| 429 | GATTataaacCTTA | CD276\|PDCD1LG2 | |
| 430 | GGAttataaacCTTA | CD276\|PDCD1LG2 | |
| 431 | GGATtataaaccTTA | CD276\|PDCD1LG2 | |
| 432 | GGATtataaacCTTA | CD276\|PDCD1LG2 | |
| 433 | AAggtcctgggAGGG | CD276\|TNFRSF14 | |
| 434 | AAGgtcctgggagGG | CD276\|TNFRSF14 | |
| 435 | AAggtcctgggagGG | CD276\|TNFRSF14 | |
| 436 | TTTCagaggctGCAG | CD276\|VTCN1 | |
| 437 | TTTcagaggctgcAG | CD276\|VTCN1 | |
| 438 | TTtcagaggctGCAG | CD276\|VTCN1 | |
| 439 | AAAaccccagtGAAG | CD276\|VTCN1 | |
| 440 | AAAAccccagtGAAG | CD276\|VTCN1 | |
| 441 | AAaaccccagtGAAG | CD276\|VTCN1 | |
| 442 | CAAaaccccagtgaAG | CD276\|VTCN1 | |
| 443 | CAAaaccccagtGAAG | CD276\|VTCN1 | |
| 444 | CAAAaccccagtGAAG | CD276\|VTCN1 | |
| 445 | AACCccagtgAAGC | CD276\|VTCN1 | |
| 446 | AAccccagtgaaGC | CD276\|VTCN1 | |
| 447 | AACcccagtgaAGC | CD276\|VTCN1 | |
| 448 | AAACcccagtgAAGC | CD276\|VTCN1 | |
| 449 | AAAccccagtgAAGC | CD276\|VTCN1 | |
| 450 | AAaccccagtgaaGC | CD276\|VTCN1 | |
| 451 | AAAAccccagtgaAGC | CD276\|VTCN1 | |
| 452 | AAAAccccagtgAAGC | CD276\|VTCN1 | |
| 453 | AAaaccccagtgaaGC | CD276\|VTCN1 | |
| 454 | CAaaaccccagtgaaGC | CD276\|VTCN1 | |
| 455 | CAAaaccccagtgaaGC | CD276\|VTCN1 | |
| 456 | CAAaaccccagtgAAGC | CD276\|VTCN1 | |
| 457 | ACCccagtgaagCC | CD276\|VTCN1 | |
| 458 | ACcccagtgaagCC | CD276\|VTCN1 | |
| 459 | ACcccagtgaaGCC | CD276\|VTCN1 | |
| 460 | AAccccagtgaagCC | CD276\|VTCN1 | |
| 461 | AACCccagtgaagCC | CD276\|VTCN1 | |
| 462 | AACcccagtgaagCC | CD276\|VTCN1 | |
| 463 | AAAccccagtgaaGCC | CD276\|VTCN1 | |
| 464 | AAAccccagtgaagCC | CD276\|VTCN1 | |
| 465 | AAaccccagtgaagCC | CD276\|VTCN1 | |
| 466 | AAAaccccagtgaagCC | CD276\|VTCN1 | |
| 467 | AAaaccccagtgaaGCC | CD276\|VTCN1 | |
| 468 | AAaaccccagtgaagCC | CD276\|VTCN1 | |
| 469 | CAAAaccccagtgaagCC | CD276\|VTCN1 | |
| 470 | CAaaaccccagtgaagCC | CD276\|VTCN1 | |
| 471 | CAAaaccccagtgaagCC | CD276\|VTCN1 | |
| 472 | CTCtttccctgacCC | CD276\|VTCN1 | |
| 473 | CTctttccctgaCCC | CD276\|VTCN1 | |
| 474 | CTctttccctgacCC | CD276\|VTCN1 | |
| 475 | AGGAgcagattCTA | CD276\|VTCN1 | |
| 476 | AGGAgcagatTCTA | CD276\|VTCN1 | |
| 477 | AGgagcagattCTA | CD276\|VTCN1 | |
| 478 | TAcccagtcaAGGA | CD276\|VTCN1 | |
| 479 | TACCcagtcaAGGA | CD276\|VTCN1 | |
| 480 | TAcccagtcaagGA | CD276\|VTCN1 | |
| 481 | CAAaaccccagTGAA | CD276\|VTCN1 | |
| 482 | CAAAaccccagtGAA | CD276\|VTCN1 | |
| 483 | CAAAaccccagTGAA | CD276\|VTCN1 | |
| 484 | CTCaaacctgGTTG | CD80\|CD274 | |
| 485 | CTCAaacctgGTTG | CD80\|CD274 | |
| 486 | CTCAaacctggtTG | CD80\|CD274 | |
| 487 | GAAGatgaatGTCA | CD80\|CD274 | |
| 488 | GAAgatgaatGTCA | CD80\|CD274 | |
| 489 | GAAGatgaatgTCA | CD80\|CD274 | |
| 490 | CAtttagttacCCA | CD80\|CD274 | |
| 491 | CAtttagttaCCCA | CD80\|CD274 | |
| 492 | CATTtagttaCCCA | CD80\|CD274 | |
| 493 | ATTTagttacCCAA | CD80\|CD274 | |
| 494 | ATTtagttacCCAA | CD80\|CD274 | |
| 495 | ATttagttacCCAA | CD80\|CD274 | |
| 496 | CATttagttacCCAA | CD80\|CD274 | |
| 497 | CATttagttaccCAA | CD80\|CD274 | |
| 498 | CATTtagttacCCAA | CD80\|CD274 | |
| 499 | GCtcttgcttgGTT | CD80\|CD86 | |
| 500 | GCtcttgcttggTT | CD80\|CD86 | |
| 501 | GCTCttgcttgGTT | CD80\|CD86 | |
| 502 | TGCtcttgcttgGTT | CD80\|CD86 | |
| 503 | TGctcttgcttggTT | CD80\|CD86 | |
| 504 | TGctcttgcttgGTT | CD80\|CD86 | |
| 505 | TGctcttgcttgGT | CD80\|CD86 | |
| 506 | TGctcttgcttGGT | CD80\|CD86 | |
| 507 | TGCTcttgcttGGT | CD80\|CD86 | |
| 508 | CATCatcagtTACT | CD80\|CD86 | |
| 509 | CATcatcagtTACT | CD80\|CD86 | |
| 510 | CATCatcagttACT | CD80\|CD86 | |
| 511 | CTGAaactcaaaGTG | CD80\|CD86 | |
| 512 | CTGaaactcaaAGTG | CD80\|CD86 | |
| 513 | CTGAaactcaaAGTG | CD80\|CD86 | |
| 514 | ACTGaaactcaaAGTG | CD80\|CD86 | |
| 515 | ACTGaaactcaaaGTG | CD80\|CD86 | |
| 516 | ACTgaaactcaaAGTG | CD80\|CD86 | |
| 517 | TCTAaggtgaTCTG | CD80\|CD86 | |
| 518 | TCTaaggtgaTCTG | CD80\|CD86 | |
| 519 | TCTAaggtgatCTG | CD80\|CD86 | |
| 520 | CTatttttaattttctgaGG | CD80\|CD86 | |
| 521 | CTatttttaattttctgAGG | CD80\|CD86 | |
| 522 | CTATttttaattttctGAGG | CD80\|CD86 | |
| 523 | GTTcatttctccaTC | CD80\|CD86 | |
| 524 | GTTCatttctcCATC | CD80\|CD86 | |
| 525 | GTTcatttctcCATC | CD80\|CD86 | |
| 526 | CTCCtgggtaAAGC | CD80\|CD86 | |
| 527 | CTcctgggtaaaGC | CD80\|CD86 | |
| 528 | CTCctgggtaaAGC | CD80\|CD86 | |
| 529 | TTCAtttctccATCC | CD80\|CD86 | |
| 530 | TTCAtttctccatCC | CD80\|CD86 | |
| 531 | TTcatttctccatCC | CD80\|CD86 | |
| 532 | GTTcatttctccATCC | CD80\|CD86 | |
| 533 | GTTcatttctccatCC | CD80\|CD86 | |
| 534 | GTtcatttctccatCC | CD80\|CD86 | |
| 535 | TCctgggtaaaGCC | CD80\|CD86 | |
| 536 | TCctgggtaaaGCC | CD80\|CD86 | |
| 537 | TCctgggtaaagCC | CD80\|CD86 | |
| 538 | CTCctgggtaaagCC | CD80\|CD86 | |
| 539 | CTcctgggtaaaGCC | CD80\|CD86 | |
| 540 | CTcctgggtaaagCC | CD80\|CD86 | |
| 541 | TTTTtaattttctgagGAAC | CD80\|CD86 | |
| 542 | TTTTtaattttctgaggaAC | CD80\|CD86 | |
| 543 | TTTttaattttctgagGAAC | CD80\|CD86 | |
| 544 | AGAGgcaaacagAAC | CD80\|CD86 | |
| 545 | AGAGgcaaacaGAAC | CD80\|CD86 | |
| 546 | AGAggcaaacaGAAC | CD80\|CD86 | |
| 547 | TTCtatttttaattttctGA | CD80\|CD86 | |
| 548 | TTCTatttttaattttCTGA | CD80\|CD86 | |
| 549 | TTCTatttttaattttcTGA | CD80\|CD86 | |
| 550 | GAGgcaaacagaACA | CD80\|CD86 | |
| 551 | GAGGcaaacagaACA | CD80\|CD86 | |
| 552 | GAGGcaaacagAACA | CD80\|CD86 | |
| 553 | AGAggcaaacagaaCA | CD80\|CD86 | |
| 554 | AGAGgcaaacagAACA | CD80\|CD86 | |
| 555 | AGAGgcaaacagaACA | CD80\|CD86 | |
| 556 | CTGCtagattagAG | CD80\|IDO1 | |
| 557 | CTGCtagattaGAG | CD80\|IDO1 | |
| 558 | CTGCtagattAGAG | CD80\|IDO1 | |
| 559 | CTTAgctgagaTTT | CD80\|PDCD1LG2 | |
| 560 | CTTAgctgagATTT | CD80\|PDCD1LG2 | |
| 561 | CTTagctgagATTT | CD80\|PDCD1LG2 | |
| 562 | CCAAttaaataCCT | CD80\|PDCD1LG2 | |
| 563 | CCAAttaaatACCT | CD80\|PDCD1LG2 | |
| 564 | CCAattaaatACCT | CD80\|PDCD1LG2 | |
| 565 | CAATtaaataCCTG | CD80\|PDCD1LG2 | |
| 566 | CAattaaataCCTG | CD80\|PDCD1LG2 | |
| 567 | CAAttaaataCCTG | CD80\|PDCD1LG2 | |
| 568 | CCAAttaaataCCTG | CD80\|PDCD1LG2 | |
| 569 | CCAattaaataCCTG | CD80\|PDCD1LG2 | |
| 570 | CCaattaaataCCTG | CD80\|PDCD1LG2 | |
| 571 | GGTGgttacaaaAG | CD80\|PDCD1LG2 | |
| 572 | GGTGgttacaaAAG | CD80\|PDCD1LG2 | |
| 573 | GGTGgttacaAAAG | CD80\|PDCD1LG2 | |
| 574 | ATTtcttgtatttTTAA | CD80\|PDCD1LG2 | |
| 575 | ATTTcttgtatttTTAA | CD80\|PDCD1LG2 | |
| 576 | ATTTcttgtattttTAA | CD80\|PDCD1LG2 | |
| 577 | AATttcttgtatttTTAA | CD80\|PDCD1LG2 | |
| 578 | AATTtcttgtattttTAA | CD80\|PDCD1LG2 | |
| 579 | AATTtcttgtatttTTAA | CD80\|PDCD1LG2 | |
| 580 | TTGAgaggctCTTT | CD80\|VTCN1 | |
| 581 | TTGAgaggctctTT | CD80\|VTCN1 | |
| 582 | TTGAgaggctcTTT | CD80\|VTCN1 | |
| 583 | TAggatttccttccTTT | CD80\|VTCN1 | |
| 584 | TAggatttccttcctTT | CD80\|VTCN1 | |
| 585 | TAGGatttccttccTTT | CD80\|VTCN1 | |
| 586 | ATaggatttccttccTTT | CD80\|VTCN1 | |
| 587 | ATAGgatttccttcctTT | CD80\|VTCN1 | |
| 588 | ATaggatttccttcctTT | CD80\|VTCN1 | |
| 589 | GAtaggatttccttccTTT | CD80\|VTCN1 | |
| 590 | GAtaggatttccttcctTT | CD80\|VTCN1 | |
| 591 | GATaggatttccttcctTT | CD80\|VTCN1 | |
| 592 | TGAtaggatttccttcctTT | CD80\|VTCN1 | |
| 593 | TGataggatttccttcctTT | CD80\|VTCN1 | |
| 594 | TGataggatttccttccTTT | CD80\|VTCN1 | |
| 595 | CATAtgataggaTTT | CD80\|VTCN1 | |
| 596 | CATAtgataggATTT | CD80\|VTCN1 | |
| 597 | CATatgataggATTT | CD80\|VTCN1 | |
| 598 | GCATatgataggATTT | CD80\|VTCN1 | |
| 599 | GCAtatgataggaTTT | CD80\|VTCN1 | |
| 600 | GCATatgataggaTTT | CD80\|VTCN1 | |
| 601 | AGCatatgataggatTT | CD80\|VTCN1 | |
| 602 | AGCAtatgataggATTT | CD80\|VTCN1 | |
| 603 | AGCAtatgataggaTTT | CD80\|VTCN1 | |
| 604 | TAGCatatgataggaTTT | CD80\|VTCN1 | |
| 605 | TAGCatatgataggatTT | CD80\|VTCN1 | |
| 606 | TAGCatatgataggATTT | CD80\|VTCN1 | |
| 607 | TAtgataggatttcCTT | CD80\|VTCN1 | |
| 608 | TATGataggatttcCTT | CD80\|VTCN1 | |
| 609 | TATGataggatttCCTT | CD80\|VTCN1 | |
| 610 | ATatgataggatttCCTT | CD80\|VTCN1 | |
| 611 | ATAtgataggatttccTT | CD80\|VTCN1 | |
| 612 | ATATgataggatttCCTT | CD80\|VTCN1 | |
| 613 | CATAtgataggatttcCTT | CD80\|VTCN1 | |
| 614 | CATatgataggatttccTT | CD80\|VTCN1 | |
| 615 | CAtatgataggatttccTT | CD80\|VTCN1 | |
| 616 | GCatatgataggatttccTT | CD80\|VTCN1 | |
| 617 | GCAtatgataggatttccTT | CD80\|VTCN1 | |
| 618 | GCatatgataggatttccTT | CD80\|VTCN1 | |
| 619 | TAGgatttccttccTT | CD80\|VTCN1 | |
| 620 | TAGGatttccttcCTT | CD80\|VTCN1 | |
| 621 | TAggatttccttccTT | CD80\|VTCN1 | |
| 622 | ATaggatttccttCCTT | CD80\|VTCN1 | |
| 623 | ATaggatttccttccTT | CD80\|VTCN1 | |
| 624 | ATaggatttccttcCTT | CD80\|VTCN1 | |
| 625 | GAtaggatttccttccTT | CD80\|VTCN1 | |
| 626 | GAtaggatttccttcCTT | CD80\|VTCN1 | |
| 627 | GATaggatttccttcCTT | CD80\|VTCN1 | |
| 628 | TGataggatttccttcCTT | CD80\|VTCN1 | |
| 629 | TGAtaggatttccttccTT | CD80\|VTCN1 | |
| 630 | TGataggatttccttccTT | CD80\|VTCN1 | |
| 631 | ATgataggatttccttcCTT | CD80\|VTCN1 | |
| 632 | ATgataggatttccttccTT | CD80\|VTCN1 | |
| 633 | ATGataggatttccttccTT | CD80\|VTCN1 | |
| 634 | GCAtatgatagGATT | CD80\|VTCN1 | |
| 635 | GCATatgatagGATT | CD80\|VTCN1 | |
| 636 | GCatatgatagGATT | CD80\|VTCN1 | |
| 637 | AGCatatgatagGATT | CD80\|VTCN1 | |
| 638 | AGcatatgatagGATT | CD80\|VTCN1 | |
| 639 | AGCAtatgatagGATT | CD80\|VTCN1 | |
| 640 | TAGCatatgataggATT | CD80\|VTCN1 | |
| 641 | TAGCatatgataggATT | CD80\|VTCN1 | |
| 642 | TAGCatatgatagGATT | CD80\|VTCN1 | |
| 643 | TTTGcaaatctgaaaCTCT | CD80\|VTCN1 | |
| 644 | TTTGcaaatctgaaacTCT | CD80\|VTCN1 | |
| 645 | TTtgcaaatctgaaacTCT | CD80\|VTCN1 | |
| 646 | TTttgcaaatctgaaaCTCT | CD80\|VTCN1 | |
| 647 | TTttgcaaatctgaaactCT | CD80\|VTCN1 | |
| 648 | TTTTgcaaatctgaaaCTCT | CD80\|VTCN1 | |
| 649 | TTCAttttgcaaaTCT | CD80\|VTCN1 | |
| 650 | TTCAttttgcaaATCT | CD80\|VTCN1 | |
| 651 | TTCattttgcaaATCT | CD80\|VTCN1 | |
| 652 | TTTCattttgcaaATCT | CD80\|VTCN1 | |
| 653 | TTTCattttgcaaaTCT | CD80\|VTCN1 | |
| 654 | TTTcattttgcaaATCT | CD80\|VTCN1 | |
| 655 | TTTTcattttgcaaATCT | CD80\|VTCN1 | |
| 656 | TTTTcattttgcaaatCT | CD80\|VTCN1 | |
| 657 | TTTtcattttgcaaATCT | CD80\|VTCN1 | |
| 658 | TATgataggatttcCT | CD80\|VTCN1 | |
| 659 | TATgataggattTCCT | CD80\|VTCN1 | |
| 660 | TATGataggattTCCT | CD80\|VTCN1 | |
| 661 | ATATgataggattTCCT | CD80\|VTCN1 | |
| 662 | ATAtgataggatttCCT | CD80\|VTCN1 | |
| 663 | ATAtgataggatttcCT | CD80\|VTCN1 | |
| 664 | CAtatgataggatttcCT | CD80\|VTCN1 | |
| 665 | CATAtgataggatttcCT | CD80\|VTCN1 | |
| 666 | CAtatgataggatttCCT | CD80\|VTCN1 | |
| 667 | GCAtatgataggatttcCT | CD80\|VTCN1 | |
| 668 | GCatatgataggatttcCT | CD80\|VTCN1 | |
| 669 | GCatatgataggatttcCT | CD80\|VTCN1 | |
| 670 | AGCatatgataggatttcCT | CD80\|VTCN1 | |
| 671 | AGCatatgataggatttcCT | CD80\|VTCN1 | |
| 672 | AGCatatgataggatttcCT | CD80\|VTCN1 | |
| 673 | TAggatttccttcCT | CD80\|VTCN1 | |
| 674 | TAGgatttcctTCCT | CD80\|VTCN1 | |
| 675 | TAGgatttccttcCT | CD80\|VTCN1 | |
| 676 | ATaggatttccttcCT | CD80\|VTCN1 | |
| 677 | ATAggatttccttcCT | CD80\|VTCN1 | |
| 678 | ATAggatttcctTCCT | CD80\|VTCN1 | |
| 679 | GAtaggatttccttcCT | CD80\|VTCN1 | |
| 680 | GATAggatttccttcCT | CD80\|VTCN1 | |
| 681 | GATaggatttccttcCT | CD80\|VTCN1 | |
| 682 | TGAtaggatttccttcCT | CD80\|VTCN1 | |
| 683 | TGataggatttccttCCT | CD80\|VTCN1 | |
| 684 | TGataggatttccttcCT | CD80\|VTCN1 | |
| 685 | ATGataggatttccttcCT | CD80\|VTCN1 | |
| 686 | ATgataggatttccttCCT | CD80\|VTCN1 | |
| 687 | ATgataggatttccttcCT | CD80\|VTCN1 | |
| 688 | TAtgataggatttccttcCT | CD80\|VTCN1 | |
| 689 | TATgataggatttccttcCT | CD80\|VTCN1 | |
| 690 | TAtgataggatttccttCCT | CD80\|VTCN1 | |
| 691 | TTTgcaaatctgaAACT | CD80\|VTCN1 | |
| 692 | TTTGcaaatctgaaACT | CD80\|VTCN1 | |
| 693 | TTTGcaaatctgaAACT | CD80\|VTCN1 | |
| 694 | TTTTgcaaatctgaAACT | CD80\|VTCN1 | |
| 695 | TTTtgcaaatctgaAACT | CD80\|VTCN1 | |
| 696 | TTTTgcaaatctgaaACT | CD80\|VTCN1 | |
| 697 | ATTTtgcaaatctgaAACT | CD80\|VTCN1 | |
| 698 | ATTTtgcaaatctgaaACT | CD80\|VTCN1 | |
| 699 | ATTTtgcaaatctgaaaCT | CD80\|VTCN1 | |
| 700 | CATTttgcaaatctgaAACT | CD80\|VTCN1 | |
| 701 | CAttttgcaaatctgaaaCT | CD80\|VTCN1 | |
| 702 | CATtttgcaaatctgaAACT | CD80\|VTCN1 | |
| 703 | AAATctgaaactCTAT | CD80\|VTCN1 | |
| 704 | AAAtctgaaactCTAT | CD80\|VTCN1 | |
| 705 | AAATctgaaactcTAT | CD80\|VTCN1 | |
| 706 | CAaatctgaaactCTAT | CD80\|VTCN1 | |
| 707 | CAAatctgaaactCTAT | CD80\|VTCN1 | |
| 708 | CAAAtctgaaactCTAT | CD80\|VTCN1 | |
| 709 | GCAaatctgaaactctAT | CD80\|VTCN1 | |
| 710 | GCAAatctgaaactCTAT | CD80\|VTCN1 | |
| 711 | GCAAatctgaaactcTAT | CD80\|VTCN1 | |
| 712 | TGCAaatctgaaactCTAT | CD80\|VTCN1 | |
| 713 | TGCaaatctgaaactcTAT | CD80\|VTCN1 | |
| 714 | TGcaaatctgaaactcTAT | CD80\|VTCN1 | |
| 715 | TTGCaaatctgaaactCTAT | CD80\|VTCN1 | |
| 716 | TTGCaaatctgaaactctAT | CD80\|VTCN1 | |
| 717 | TTgcaaatctgaaactctAT | CD80\|VTCN1 | |
| 718 | GCATatgataGGAT | CD80\|VTCN1 | |
| 719 | GCAtatgataGGAT | CD80\|VTCN1 | |
| 720 | GCatatgataGGAT | CD80\|VTCN1 | |
| 721 | AGCAtatgataggAT | CD80\|VTCN1 | |
| 722 | AGCatatgataGGAT | CD80\|VTCN1 | |
| 723 | AGCAtatgataGGAT | CD80\|VTCN1 | |
| 724 | TAGCatatgataGGAT | CD80\|VTCN1 | |
| 725 | TAGCatatgatagGAT | CD80\|VTCN1 | |
| 726 | TAGcatatgatagGAT | CD80\|VTCN1 | |
| 727 | CATtttgcaaaTCTG | CD80\|VTCN1 | |
| 728 | CATTttgcaaatCTG | CD80\|VTCN1 | |
| 729 | CATTttgcaaaTCTG | CD80\|VTCN1 | |
| 730 | TCATtttgcaaaTCTG | CD80\|VTCN1 | |
| 731 | TCATtttgcaaatCTG | CD80\|VTCN1 | |
| 732 | TCAttttgcaaatCTG | CD80\|VTCN1 | |
| 733 | TTCAttttgcaaatCTG | CD80\|VTCN1 | |
| 734 | TTCAttttgcaaaTCTG | CD80\|VTCN1 | |
| 735 | TTCattttgcaaatCTG | CD80\|VTCN1 | |
| 736 | TTTCattttgcaaatcTG | CD80\|VTCN1 | |
| 737 | TTTCattttgcaaaTCTG | CD80\|VTCN1 | |
| 738 | TTTCattttgcaaatCTG | CD80\|VTCN1 | |
| 739 | TTTtcattttgcaaaTCTG | CD80\|VTCN1 | |
| 740 | TTTtcattttgcaaatcTG | CD80\|VTCN1 | |
| 741 | TTTTcattttgcaaaTCTG | CD80\|VTCN1 | |
| 742 | CTCctttgttcaCTG | CD80\|VTCN1 | |
| 743 | CTcctttgttcacTG | CD80\|VTCN1 | |
| 744 | CTCCtttgttcaCTG | CD80\|VTCN1 | |
| 745 | TAGcatatgaTAGG | CD80\|VTCN1 | |
| 746 | TAGCatatgaTAGG | CD80\|VTCN1 | |
| 747 | TAGCatatgatAGG | CD80\|VTCN1 | |
| 748 | TAggtgcttcTTAG | CD80\|VTCN1 | |
| 749 | TAGGtgcttcTTAG | CD80\|VTCN1 | |
| 750 | TAGGtgcttctTAG | CD80\|VTCN1 | |
| 751 | TTGTttgtttaaaaAG | CD80\|VTCN1 | |
| 752 | TTGTttgtttaaAAAG | CD80\|VTCN1 | |
| 753 | TTGTttgtttaaaAAG | CD80\|VTCN1 | |
| 754 | ATATgataggatTTC | CD80\|VTCN1 | |
| 755 | ATATgataggaTTTC | CD80\|VTCN1 | |
| 756 | ATAtgataggaTTTC | CD80\|VTCN1 | |
| 757 | CATAtgataggaTTTC | CD80\|VTCN1 | |
| 758 | CATAtgataggatTTC | CD80\|VTCN1 | |
| 759 | CATatgataggaTTTC | CD80\|VTCN1 | |
| 760 | GCatatgataggatTTC | CD80\|VTCN1 | |
| 761 | GCATatgataggatTTC | CD80\|VTCN1 | |
| 762 | GCATatgataggaTTTC | CD80\|VTCN1 | |
| 763 | AGCAtatgataggattTC | CD80\|VTCN1 | |
| 764 | AGCatatgataggatTTC | CD80\|VTCN1 | |
| 765 | AGCAtatgataggaTTTC | CD80\|VTCN1 | |
| 766 | TAGCatatgataggaTTTC | CD80\|VTCN1 | |
| 767 | TAgcatatgataggattTC | CD80\|VTCN1 | |
| 768 | TAGcatatgataggaTTTC | CD80\|VTCN1 | |
| 769 | ATGataggatttcCTTC | CD80\|VTCN1 | |
| 770 | ATgataggatttccTTC | CD80\|VTCN1 | |
| 771 | ATGAtaggatttcCTTC | CD80\|VTCN1 | |
| 772 | TATGataggatttcCTTC | CD80\|VTCN1 | |
| 773 | TATGataggatttcctTC | CD80\|VTCN1 | |
| 774 | TAtgataggatttcctTC | CD80\|VTCN1 | |
| 775 | ATATgataggatttcCTTC | CD80\|VTCN1 | |
| 776 | ATAtgataggatttccTTC | CD80\|VTCN1 | |
| 777 | ATatgataggatttcctTC | CD80\|VTCN1 | |
| 778 | CAtatgataggatttcctTC | CD80\|VTCN1 | |
| 779 | CATAtgataggatttccTTC | CD80\|VTCN1 | |
| 780 | CAtatgataggatttccTTC | CD80\|VTCN1 | |
| 781 | TTTGcaaatctgaaACTC | CD80\|VTCN1 | |
| 782 | TTTgcaaatctgaaaCTC | CD80\|VTCN1 | |
| 783 | TTTGcaaatctgaaaCTC | CD80\|VTCN1 | |
| 784 | TTTTgcaaatctgaaaCTC | CD80\|VTCN1 | |
| 785 | TTTTgcaaatctgaaacTC | CD80\|VTCN1 | |
| 786 | TTTTgcaaatctgaaACTC | CD80\|VTCN1 | |
| 787 | ATTttgcaaatctgaaACTC | CD80\|VTCN1 | |
| 788 | ATTTtgcaaatctgaaACTC | CD80\|VTCN1 | |
| 789 | ATTttgcaaatctgaaacTC | CD80\|VTCN1 | |
| 790 | TTTCattttgcaAATC | CD80\|VTCN1 | |
| 791 | TTTCattttgcaaATC | CD80\|VTCN1 | |
| 792 | TTTcattttgcaAATC | CD80\|VTCN1 | |
| 793 | TTTTcattttgcaAATC | CD80\|VTCN1 | |
| 794 | TTTtcattttgcaAATC | CD80\|VTCN1 | |
| 795 | TTTTcattttgcaaATC | CD80\|VTCN1 | |
| 796 | TCCtttgttcacTGC | CD80\|VTCN1 | |
| 797 | TCctttgttcacTGC | CD80\|VTCN1 | |
| 798 | TCctttgttcactGC | CD80\|VTCN1 | |
| 799 | CTcctttgttcactGC | CD80\|VTCN1 | |
| 800 | CTCctttgttcactGC | CD80\|VTCN1 | |
| 801 | CTCctttgttcacTGC | CD80\|VTCN1 | |
| 802 | TATGataggattTCC | CD80\|VTCN1 | |
| 803 | TATGataggatTTCC | CD80\|VTCN1 | |
| 804 | TATGataggatttCC | CD80\|VTCN1 | |
| 805 | ATatgataggatTTCC | CD80\|VTCN1 | |
| 806 | ATATgataggatTTCC | CD80\|VTCN1 | |
| 807 | ATATgataggattTCC | CD80\|VTCN1 | |
| 808 | CATAtgataggatTTCC | CD80\|VTCN1 | |
| 809 | CATatgataggatTTCC | CD80\|VTCN1 | |
| 810 | CAtatgataggatttCC | CD80\|VTCN1 | |
| 811 | GCatatgataggattTCC | CD80\|VTCN1 | |
| 812 | GCAtatgataggattTCC | CD80\|VTCN1 | |
| 813 | GCatatgataggatttCC | CD80\|VTCN1 | |
| 814 | AGcatatgataggattTCC | CD80\|VTCN1 | |
| 815 | AGcatatgataggatttCC | CD80\|VTCN1 | |
| 816 | AGCatatgataggatttCC | CD80\|VTCN1 | |
| 817 | TAgcatatgataggatTTCC | CD80\|VTCN1 | |
| 818 | TAgcatatgataggattTCC | CD80\|VTCN1 | |
| 819 | TAgcatatgataggatttCC | CD80\|VTCN1 | |
| 820 | ATaggatttccttCC | CD80\|VTCN1 | |
| 821 | ATAggatttcctTCC | CD80\|VTCN1 | |
| 822 | ATAGgatttccTTCC | CD80\|VTCN1 | |
| 823 | GATAggatttcctTCC | CD80\|VTCN1 | |
| 824 | GAtaggatttccttCC | CD80\|VTCN1 | |
| 825 | GAtaggatttcctTCC | CD80\|VTCN1 | |
| 826 | TGataggatttcctTCC | CD80\|VTCN1 | |
| 827 | TGataggatttccttCC | CD80\|VTCN1 | |
| 828 | TGATaggatttccttCC | CD80\|VTCN1 | |
| 829 | ATgataggatttccttCC | CD80\|VTCN1 | |
| 830 | ATGataggatttcctTCC | CD80\|VTCN1 | |
| 831 | ATgataggatttcctTCC | CD80\|VTCN1 | |
| 832 | TAtgataggatttccttCC | CD80\|VTCN1 | |
| 833 | TAtgataggatttcctTCC | CD80\|VTCN1 | |
| 834 | TATgataggatttccttCC | CD80\|VTCN1 | |
| 835 | ATAtgataggatttccttCC | CD80\|VTCN1 | |
| 836 | ATatgataggatttcctTCC | CD80\|VTCN1 | |
| 837 | ATatgataggatttccttCC | CD80\|VTCN1 | |
| 838 | TTTgcaaatctgAAAC | CD80\|VTCN1 | |
| 839 | TTTGcaaatctgaAAC | CD80\|VTCN1 | |
| 840 | TTTGcaaatctgAAAC | CD80\|VTCN1 | |
| 841 | TTTTgcaaatctgAAAC | CD80\|VTCN1 | |
| 842 | TTTTgcaaatctgaAAC | CD80\|VTCN1 | |
| 843 | TTTTgcaaatctgaaAC | CD80\|VTCN1 | |
| 844 | ATTTtgcaaatctgaAAC | CD80\|VTCN1 | |
| 845 | ATTTtgcaaatctgAAAC | CD80\|VTCN1 | |
| 846 | ATTttgcaaatctgAAAC | CD80\|VTCN1 | |
| 847 | CATTttgcaaatctgaaAC | CD80\|VTCN1 | |
| 848 | CATTttgcaaatctgAAAC | CD80\|VTCN1 | |
| 849 | CATTttgcaaatctgaAAC | CD80\|VTCN1 | |
| 850 | TCATtttgcaaatctgAAAC | CD80\|VTCN1 | |
| 851 | TCattttgcaaatctgAAAC | CD80\|VTCN1 | |
| 852 | TCATtttgcaaatctgaAAC | CD80\|VTCN1 | |
| 853 | CAAatctgaaacTCTA | CD80\|VTCN1 | |
| 854 | CAAAtctgaaacTCTA | CD80\|VTCN1 | |
| 855 | CAaatctgaaacTCTA | CD80\|VTCN1 | |
| 856 | GCAaatctgaaactcTA | CD80\|VTCN1 | |
| 857 | GCAAatctgaaacTCTA | CD80\|VTCN1 | |
| 858 | GCAaatctgaaacTCTA | CD80\|VTCN1 | |
| 859 | TGCAaatctgaaacTCTA | CD80\|VTCN1 | |
| 860 | TGCaaatctgaaactCTA | CD80\|VTCN1 | |
| 861 | TGcaaatctgaaactCTA | CD80\|VTCN1 | |
| 862 | TTGCaaatctgaaacTCTA | CD80\|VTCN1 | |
| 863 | TTGcaaatctgaaactcTA | CD80\|VTCN1 | |
| 864 | TTGCaaatctgaaactcTA | CD80\|VTCN1 | |
| 865 | TTtgcaaatctgaaactcTA | CD80\|VTCN1 | |
| 866 | TTTgcaaatctgaaactCTA | CD80\|VTCN1 | |
| 867 | TTTGcaaatctgaaacTCTA | CD80\|VTCN1 | |
| 868 | CATtttgcaaatcTGA | CD80\|VTCN1 | |
| 869 | CATtttgcaaatCTGA | CD80\|VTCN1 | |
| 870 | CATTttgcaaatCTGA | CD80\|VTCN1 | |
| 871 | TCAttttgcaaatCTGA | CD80\|VTCN1 | |
| 872 | TCATtttgcaaatCTGA | CD80\|VTCN1 | |
| 873 | TCattttgcaaatcTGA | CD80\|VTCN1 | |
| 874 | TTCattttgcaaatctGA | CD80\|VTCN1 | |
| 875 | TTCAttttgcaaatCTGA | CD80\|VTCN1 | |
| 876 | TTCAttttgcaaatcTGA | CD80\|VTCN1 | |
| 877 | TTTcattttgcaaatctGA | CD80\|VTCN1 | |
| 878 | TTTCattttgcaaatCTGA | CD80\|VTCN1 | |
| 879 | TTtcattttgcaaatCTGA | CD80\|VTCN1 | |
| 880 | TTTTcattttgcaaatCTGA | CD80\|VTCN1 | |
| 881 | TTttcattttgcaaatctGA | CD80\|VTCN1 | |
| 882 | TTTtcattttgcaaatcTGA | CD80\|VTCN1 | |
| 883 | AGCAtatgataGGA | CD80\|VTCN1 | |
| 884 | AGCAtatgatagGA | CD80\|VTCN1 | |
| 885 | AGCAtatgatAGGA | CD80\|VTCN1 | |
| 886 | TAGCatatgatAGGA | CD80\|VTCN1 | |
| 887 | TAGCatatgataGGA | CD80\|VTCN1 | |
| 888 | TAgcatatgatAGGA | CD80\|VTCN1 | |
| 889 | TTTTgcaaatcTGAA | CD80\|VTCN1 | |
| 890 | TTTtgcaaatcTGAA | CD80\|VTCN1 | |
| 891 | TTTTgcaaatctGAA | CD80\|VTCN1 | |
| 892 | ATTttgcaaatcTGAA | CD80\|VTCN1 | |
| 893 | ATTTtgcaaatcTGAA | CD80\|VTCN1 | |
| 894 | ATtttgcaaatcTGAA | CD80\|VTCN1 | |
| 895 | CATTttgcaaatctGAA | CD80\|VTCN1 | |
| 896 | CATtttgcaaatcTGAA | CD80\|VTCN1 | |
| 897 | CATTttgcaaatcTGAA | CD80\|VTCN1 | |
| 898 | TCATtttgcaaatcTGAA | CD80\|VTCN1 | |
| 899 | TCAttttgcaaatcTGAA | CD80\|VTCN1 | |
| 900 | TCATtttgcaaatctgAA | CD80\|VTCN1 | |
| 901 | TTCAttttgcaaatcTGAA | CD80\|VTCN1 | |
| 902 | TTCattttgcaaatctGAA | CD80\|VTCN1 | |
| 903 | TTCattttgcaaatcTGAA | CD80\|VTCN1 | |
| 904 | TTtcattttgcaaatctGAA | CD80\|VTCN1 | |
| 905 | TTTCattttgcaaatcTGAA | CD80\|VTCN1 | |
| 906 | TTTcattttgcaaatcTGAA | CD80\|VTCN1 | |
| 907 | TTTTgcaaatctgAAA | CD80\|VTCN1 | |
| 908 | TTTtgcaaatctGAAA | CD80\|VTCN1 | |
| 909 | TTTTgcaaatctGAAA | CD80\|VTCN1 | |
| 910 | ATTttgcaaatctGAAA | CD80\|VTCN1 | |
| 911 | ATTTtgcaaatctGAAA | CD80\|VTCN1 | |
| 912 | ATTTtgcaaatctgAAA | CD80\|VTCN1 | |
| 913 | CATTttgcaaatctGAAA | CD80\|VTCN1 | |
| 914 | CATTttgcaaatctgAAA | CD80\|VTCN1 | |
| 915 | CATtttgcaaatctGAAA | CD80\|VTCN1 | |
| 916 | TCAttttgcaaatctGAAA | CD80\|VTCN1 | |
| 917 | TCATtttgcaaatctgaAA | CD80\|VTCN1 | |
| 918 | TCATtttgcaaatctGAAA | CD80\|VTCN1 | |
| 919 | TTCAttttgcaaatctGAAA | CD80\|VTCN1 | |
| 920 | TTCAttttgcaaatctgAAA | CD80\|VTCN1 | |
| 921 | TTcattttgcaaatctGAAA | CD80\|VTCN1 | |
| 922 | CCTGtaattcacAC | CD86\|CD274 | |
| 923 | CCTGtaattcACAC | CD86\|CD274 | |
| 924 | CCTGtaattcaCAC | CD86\|CD274 | |
| 925 | CTAAttatggaaAAC | CD86\|CD274 | |
| 926 | CTAAttatggaAAAC | CD86\|CD274 | |
| 927 | CTAattatggaAAAC | CD86\|CD274 | |
| 928 | CCTAattatggaaaAC | CD86\|CD274 | |
| 929 | CCTAattatggaAAAC | CD86\|CD274 | |
| 930 | CCTAattatggaaAAC | CD86\|CD274 | |
| 931 | CCTGtaattcacACA | CD86\|CD274 | |
| 932 | CCTGtaattcaCACA | CD86\|CD274 | |
| 933 | CCtgtaattcacACA | CD86\|CD274 | |
| 934 | CTAattatggaaAACA | CD86\|CD274 | |
| 935 | CTAAttatggaaAACA | CD86\|CD274 | |
| 936 | CTAAttatggaaaACA | CD86\|CD274 | |
| 937 | CCTAattatggaaAACA | CD86\|CD274 | |
| 938 | CCTaattatggaaaACA | CD86\|CD274 | |
| 939 | CCTAattatggaaaACA | CD86\|CD274 | |
| 940 | TCTTtgtaaatgaAAA | CD86\|CD274 | |
| 941 | TCTTtgtaaatgAAAA | CD86\|CD274 | |
| 942 | TCTttgtaaatgAAAA | CD86\|CD274 | |
| 943 | CCTAattatggAAAA | CD86\|CD274 | |
| 944 | CCTaattatggAAAA | CD86\|CD274 | |
| 945 | CCTAattatggaAAA | CD86\|CD274 | |
| 946 | TTTggcttcccACT | CD86\|IDO1 | |
| 947 | TTTGgcttccCACT | CD86\|IDO1 | |
| 948 | TTtggcttcccaCT | CD86\|IDO1 | |
| 949 | ATttggcttcccaCT | CD86\|IDO1 | |
| 950 | ATTtggcttcccaCT | CD86\|IDO1 | |
| 951 | ATTtggcttccCACT | CD86\|IDO1 | |
| 952 | TTTGgcttcccaCTG | CD86\|IDO1 | |
| 953 | TTtggcttcccacTG | CD86\|IDO1 | |
| 954 | TTTggcttcccacTG | CD86\|IDO1 | |
| 955 | ATttggcttcccacTG | CD86\|IDO1 | |
| 956 | ATTtggcttcccACTG | CD86\|IDO1 | |
| 957 | ATTtggcttcccacTG | CD86\|IDO1 | |
| 958 | ATTtggcttcccAC | CD86\|IDO1 | |
| 959 | ATTTggcttccCAC | CD86\|IDO1 | |
| 960 | ATTTggcttcCCAC | CD86\|IDO1 | |
| 961 | TCtcttctccttctcTT | CD86\|LGALS9 | |
| 962 | TCTCttctccttctcTT | CD86\|LGALS9 | |
| 963 | TCTcttctccttctcTT | CD86\|LGALS9 | |
| 964 | TGgatgactgtCTG | CD86\|LGALS9 | |
| 965 | TGGAtgactgTCTG | CD86\|LGALS9 | |
| 966 | TGGAtgactgtCTG | CD86\|LGALS9 | |
| 967 | CTcttctccttctcTTC | CD86\|LGALS9 | |
| 968 | CTCttctccttctcTTC | CD86\|LGALS9 | |
| 969 | CTcttctccttctctTC | CD86\|LGALS9 | |
| 970 | TCtcttctccttctctTC | CD86\|LGALS9 | |
| 971 | TCTcttctccttctctTC | CD86\|LGALS9 | |
| 972 | TCtcttctccttctcTTC | CD86\|LGALS9 | |
| 973 | GGgtttggaactGG | CD86\|PDCD1 | |
| 974 | GGGTttggaaCTGG | CD86\|PDCD1 | |
| 975 | GGGtttggaacTGG | CD86\|PDCD1 | |
| 976 | TGGGttgatgAGAG | CD86\|PDCD1 | |
| 977 | TGGgttgatgAGAG | CD86\|PDCD1 | |
| 978 | TGGgttgatgagAG | CD86\|PDCD1 | |
| 979 | GGTtgatgagAGAG | CD86\|PDCD1 | |
| 980 | GGTTgatgagAGAG | CD86\|PDCD1 | |
| 981 | GGttgatgagAGAG | CD86\|PDCD1 | |
| 982 | GGGTtgatgagAGAG | CD86\|PDCD1 | |
| 983 | GGgttgatgagagAG | CD86\|PDCD1 | |
| 984 | GGgttgatgagAGAG | CD86\|PDCD1 | |
| 985 | TGggttgatgagagAG | CD86\|PDCD1 | |
| 986 | TGGGttgatgagagAG | CD86\|PDCD1 | |
| 987 | TGGgttgatgagAGAG | CD86\|PDCD1 | |
| 988 | GTctcaggcctgGGC | CD86\|PDCD1 | |
| 989 | GTctcaggcctggGC | CD86\|PDCD1 | |
| 990 | GTctcaggcctggGC | CD86\|PDCD1 | |
| 991 | TGcccagaatctCC | CD86\|PDCD1 | |
| 992 | TGCccagaatcTCC | CD86\|PDCD1 | |
| 993 | TGcccagaatcTCC | CD86\|PDCD1 | |
| 994 | GGGttgatgagaGA | CD86\|PDCD1 | |
| 995 | GGGTtgatgagAGA | CD86\|PDCD1 | |
| 996 | GGGTtgatgaGAGA | CD86\|PDCD1 | |
| 997 | TGGgttgatgagAGA | CD86\|PDCD1 | |
| 998 | TGGGttgatgaGAGA | CD86\|PDCD1 | |
| 999 | TGggttgatgagAGA | CD86\|PDCD1 | |
| 1000 | CCtctcccagtgTCT | CD86\|PDCD1LG2 | |
| 1001 | CCtctcccagtgtCT | CD86\|PDCD1LG2 | |
| 1002 | CCTctcccagtgtCT | CD86\|PDCD1LG2 | |
| 1003 | CTTtctgaagGTTG | CD86\|PDCD1LG2 | |
| 1004 | CTttctgaagGTTG | CD86\|PDCD1LG2 | |
| 1005 | CTTTctgaagGTTG | CD86\|PDCD1LG2 | |
| 1006 | GGGcccttccatGG | CD86\|PDCD1LG2 | |
| 1007 | GGgcccttccaTGG | CD86\|PDCD1LG2 | |
| 1008 | GGgcccttccatGG | CD86\|PDCD1LG2 | |
| 1009 | GAaactgaggctcaaagaAG | CD86\|PDCD1LG2 | |
| 1010 | GAAActgaggctcaaaGAAG | CD86\|PDCD1LG2 | |
| 1011 | GAAActgaggctcaaagAAG | CD86\|PDCD1LG2 | |
| 1012 | CTGGgcagataaaAG | CD86\|PDCD1LG2 | |
| 1013 | CTGGgcagataAAAG | CD86\|PDCD1LG2 | |
| 1014 | CTGGgcagataaAAG | CD86\|PDCD1LG2 | |
| 1015 | TTtttccatccatCC | CD86\|PDCD1LG2 | |
| 1016 | TTtttccatccATCC | CD86\|PDCD1LG2 | |
| 1017 | TTTTtccatccATCC | CD86\|PDCD1LG2 | |
| 1018 | CTctcccagtgtcTA | CD86\|PDCD1LG2 | |
| 1019 | CTctcccagtgTCTA | CD86\|PDCD1LG2 | |
| 1020 | CTCtcccagtgtcTA | CD86\|PDCD1LG2 | |
| 1021 | CCtctcccagtgtCTA | CD86\|PDCD1LG2 | |
| 1022 | CCtctcccagtgtcTA | CD86\|PDCD1LG2 | |
| 1023 | CCTctcccagtgtcTA | CD86\|PDCD1LG2 | |
| 1024 | TCAGgagctaaGAA | CD86\|PDCD1LG2 | |
| 1025 | TCAGgagctaAGAA | CD86\|PDCD1LG2 | |
| 1026 | TCAggagctaAGAA | CD86\|PDCD1LG2 | |
| 1027 | AAGAggtgacGGCT | CD86\|TNFRSF14 | |
| 1028 | AAGaggtgacGGCT | CD86\|TNFRSF14 | |
| 1029 | AAGaggtgacggCT | CD86\|TNFRSF14 | |
| 1030 | CAAGaggtgacggCT | CD86\|TNFRSF14 | |
| 1031 | CAagaggtgacggCT | CD86\|TNFRSF14 | |
| 1032 | CAAgaggtgacGGCT | CD86\|TNFRSF14 | |
| 1033 | AGAggtgacggCTG | CD86\|TNFRSF14 | |
| 1034 | AGAggtgacgGCTG | CD86\|TNFRSF14 | |
| 1035 | AGaggtgacggcTG | CD86\|TNFRSF14 | |
| 1036 | AAGAggtgacgGCTG | CD86\|TNFRSF14 | |
| 1037 | AAGaggtgacggcTG | CD86\|TNFRSF14 | |
| 1038 | AAGAggtgacggcTG | CD86\|TNFRSF14 | |
| 1039 | CAagaggtgacggCTG | CD86\|TNFRSF14 | |
| 1040 | CAagaggtgacggcTG | CD86\|TNFRSF14 | |
| 1041 | CAagaggtgacgGCTG | CD86\|TNFRSF14 | |
| 1042 | GAggtgacggctGG | CD86\|TNFRSF14 | |
| 1043 | GAGgtgacggcTGG | CD86\|TNFRSF14 | |
| 1044 | GAggtgacggcTGG | CD86\|TNFRSF14 | |
| 1045 | AGaggtgacggctGG | CD86\|TNFRSF14 | |
| 1046 | AGaggtgacggcTGG | CD86\|TNFRSF14 | |
| 1047 | AGAggtgacggcTGG | CD86\|TNFRSF14 | |
| 1048 | AAGaggtgacggCTGG | CD86\|TNFRSF14 | |
| 1049 | AAgaggtgacggctGG | CD86\|TNFRSF14 | |
| 1050 | AAgaggtgacggcTGG | CD86\|TNFRSF14 | |
| 1051 | CAAGaggtgacggctGG | CD86\|TNFRSF14 | |
| 1052 | CAAgaggtgacggctGG | CD86\|TNFRSF14 | |
| 1053 | CAagaggtgacggctGG | CD86\|TNFRSF14 | |
| 1054 | CAagaggtgaCGGC | CD86\|TNFRSF14 | |
| 1055 | CAagaggtgacgGC | CD86\|TNFRSF14 | |
| 1056 | CAAGaggtgaCGGC | CD86\|TNFRSF14 | |
| 1057 | CCAGggcttcatCA | CD86\|TNFRSF14 | |
| 1058 | CCagggcttcatCA | CD86\|TNFRSF14 | |
| 1059 | CCagggcttcaTCA | CD86\|TNFRSF14 | |
| 1060 | TACAcagtagtGTG | CD86\|VTCN1 | |
| 1061 | TACacagtagTGTG | CD86\|VTCN1 | |
| 1062 | TACAcagtagTGTG | CD86\|VTCN1 | |
| 1063 | GAgccatgcccATC | CD86\|VTCN1 | |
| 1064 | GAgccatgccCATC | CD86\|VTCN1 | |
| 1065 | GAgccatgcccaTC | CD86\|VTCN1 | |
| 1066 | GGagccatgcccATC | CD86\|VTCN1 | |
| 1067 | GGagccatgcccaTC | CD86\|VTCN1 | |
| 1068 | GGAgccatgcccaTC | CD86\|VTCN1 | |
| 1069 | CATCtttggaCTGC | CD86\|VTCN1 | |
| 1070 | CATctttggactGC | CD86\|VTCN1 | |
| 1071 | CATCtttggacTGC | CD86\|VTCN1 | |
| 1072 | ATCTctatcctgGC | CD86\|VTCN1 | |
| 1073 | ATCTctatccTGGC | CD86\|VTCN1 | |
| 1074 | ATctctatcctgGC | CD86\|VTCN1 | |
| 1075 | GAgccatgcccaTCC | CD86\|VTCN1 | |
| 1076 | GAgccatgcccatCC | CD86\|VTCN1 | |
| 1077 | GAGccatgcccatCC | CD86\|VTCN1 | |
| 1078 | GGagccatgcccATCC | CD86\|VTCN1 | |
| 1079 | GGagccatgcccaTCC | CD86\|VTCN1 | |
| 1080 | GGagccatgcccatCC | CD86\|VTCN1 | |
| 1081 | AGAgttaggagaAGA | CD86\|VTCN1 | |
| 1082 | AGAGttaggagAAGA | CD86\|VTCN1 | |
| 1083 | AGAGttaggagaAGA | CD86\|VTCN1 | |
| 1084 | GATctggctgCTAA | CD86\|VTCN1 | |
| 1085 | GATCtggctgCTAA | CD86\|VTCN1 | |
| 1086 | GATCtggctgctAA | CD86\|VTCN1 | |
| 1087 | GCAtttgtaaaCCAA | CD86\|VTCN1 | |
| 1088 | GCATttgtaaaCCAA | CD86\|VTCN1 | |
| 1089 | GCatttgtaaaCCAA | CD86\|VTCN1 | |
| 1090 | GAGActtggcaaAA | CD86\|VTCN1 | |
| 1091 | GAGActtggcaAAA | CD86\|VTCN1 | |
| 1092 | GAGActtggcAAAA | CD86\|VTCN1 | |
| 1093 | GAGGaatacggAAG | CTLA4\|CD274 | |
| 1094 | GAGGaatacgGAAG | CTLA4\|CD274 | |
| 1095 | GAGgaatacgGAAG | CTLA4\|CD274 | |
| 1096 | TGAggaatacgGAAG | CTLA4\|CD274 | |
| 1097 | TGAGgaatacgGAAG | CTLA4\|CD274 | |
| 1098 | TGAGgaatacggaAG | CTLA4\|CD274 | |
| 1099 | CCAtgatccaaTTC | CTLA4\|CD274 | |
| 1100 | CCATgatccaATTC | CTLA4\|CD274 | |
| 1101 | CCATgatccaaTTC | CTLA4\|CD274 | |
| 1102 | TGAGgaatacgGAA | CTLA4\|CD274 | |
| 1103 | TGAGgaatacGGAA | CTLA4\|CD274 | |
| 1104 | TGAggaatacGGAA | CTLA4\|CD274 | |
| 1105 | CCAAcacctgtGAT | CTLA4\|CD86 | |
| 1106 | CCaacacctgtgAT | CTLA4\|CD86 | |
| 1107 | CCAAcacctgTGAT | CTLA4\|CD86 | |
| 1108 | ACcaacacctgtgAT | CTLA4\|CD86 | |
| 1109 | ACCAacacctgtgAT | CTLA4\|CD86 | |
| 1110 | ACCAacacctgTGAT | CTLA4\|CD86 | |
| 1111 | TACcaacacctgtGAT | CTLA4\|CD86 | |
| 1112 | TAccaacacctgtgAT | CTLA4\|CD86 | |
| 1113 | TACCaacacctgtGAT | CTLA4\|CD86 | |
| 1114 | TACCaacaccTGTG | CTLA4\|CD86 | |
| 1115 | TACCaacacctGTG | CTLA4\|CD86 | |
| 1116 | TAccaacacctGTG | CTLA4\|CD86 | |
| 1117 | TAccaacacctGTGA | CTLA4\|CD86 | |
| 1118 | TAccaacacctgtGA | CTLA4\|CD86 | |
| 1119 | TACCaacacctGTGA | CTLA4\|CD86 | |
| 1120 | ACTctagggctcTA | CTLA4\|LGALS9 | |
| 1121 | ACTCtagggcTCTA | CTLA4\|LGALS9 | |
| 1122 | ACTctagggcTCTA | CTLA4\|LGALS9 | |
| 1123 | GACacaacatcTTTT | HMOX1\|CD80 | |
| 1124 | GACAcaacatctTTT | HMOX1\|CD80 | |
| 1125 | GACAcaacatcTTTT | HMOX1\|CD80 | |
| 1126 | GACAcaacatCTTT | HMOX1\|CD80 | |
| 1127 | GACAcaacatcTTT | HMOX1\|CD80 | |
| 1128 | GACacaacatCTTT | HMOX1\|CD80 | |
| 1129 | TTAgaagcagGACA | HMOX1\|CD80 | |
| 1130 | TTAGaagcagGACA | HMOX1\|CD80 | |
| 1131 | TTAGaagcaggACA | HMOX1\|CD80 | |
| 1132 | TTTagaagcagGACA | HMOX1\|CD80 | |
| 1133 | TTTAgaagcagGACA | HMOX1\|CD80 | |
| 1134 | TTTAgaagcaggACA | HMOX1\|CD80 | |
| 1135 | CAgccttgtggcTGG | HMOX1\|CD86 | |
| 1136 | CAGccttgtggctGG | HMOX1\|CD86 | |
| 1137 | CAgccttgtggctGG | HMOX1\|CD86 | |
| 1138 | CCCtgcctgctctTG | HMOX1\|PDCD1LG2 | |
| 1139 | CCctgcctgctcTTG | HMOX1\|PDCD1LG2 | |
| 1140 | CCctgcctgctctTG | HMOX1\|PDCD1LG2 | |
| 1141 | CCtgcctgctctTGC | HMOX1\|PDCD1LG2 | |
| 1142 | CCTgcctgctcttGC | HMOX1\|PDCD1LG2 | |
| 1143 | CCtgcctgctcttGC | HMOX1\|PDCD1LG2 | |
| 1144 | CCctgcctgctcttGC | HMOX1\|PDCD1LG2 | |
| 1145 | CCCtgcctgctcttGC | HMOX1\|PDCD1LG2 | |
| 1146 | CCctgcctgctctTGC | HMOX1\|PDCD1LG2 | |
| 1147 | AGttccctcaccTGC | HMOX1\|PDCD1LG2 | |
| 1148 | AGttccctcacctGC | HMOX1\|PDCD1LG2 | |
| 1149 | AGTtccctcacctGC | HMOX1\|PDCD1LG2 | |
| 1150 | CCCAcgctgatgTT | HMOX1\|VTCN1 | |
| 1151 | CCcacgctgatGTT | HMOX1\|VTCN1 | |
| 1152 | CCcacgctgatgTT | HMOX1\|VTCN1 | |
| 1153 | TAAGccaatgaACAA | PDCD1LG2\|IDO1 | |
| 1154 | TAAGccaatgaaCAA | PDCD1LG2\|IDO1 | CRM0198 |
| 1155 | TAAgccaatgaACAA | PDCD1LG2\|IDO1 | |
| 1156 | CCCacccaggaagGA | PDCD1\|LGALS9 | |
| 1157 | CCcacccaggaaGGA | PDCD1\|LGALS9 | |
| 1158 | CCcacccaggaagGA | PDCD1\|LGALS9 | |
| 1159 | GCAgaacactgGTG | PDCD1\|PDCD1LG2 | |
| 1160 | GCagaacactgGTG | PDCD1\|PDCD1LG2 | |
| 1161 | GCAGaacactGGTG | PDCD1\|PDCD1LG2 | |
| 1162 | CTcaacccttTTCC | PDCD1\|PDCD1LG2 | |
| 1163 | CTcaacccttttCC | PDCD1\|PDCD1LG2 | |
| 1164 | CTCAacccttTTCC | PDCD1\|PDCD1LG2 | |
| 1165 | CCCacaaagggcCT | PDCD1\|VTCN1 | |
| 1166 | CCcacaaagggcCT | PDCD1\|VTCN1 | |
| 1167 | CCcacaaagggCCT | PDCD1\|VTCN1 | |
| 1168 | CCacaaagggccTG | PDCD1\|VTCN1 | |
| 1169 | CCACaaagggcCTG | PDCD1\|VTCN1 | |
| 1170 | CCacaaagggcCTG | PDCD1\|VTCN1 | |
| 1171 | CCCacaaagggccTG | PDCD1\|VTCN1 | |
| 1172 | CCcacaaagggccTG | PDCD1\|VTCN1 | |
| 1173 | CCcacaaagggcCTG | PDCD1\|VTCN1 | |
| 1174 | AAAGatgcttcaGAG | PDCD1\|VTCN1 | |
| 1175 | AAAGatgcttcAGAG | PDCD1\|VTCN1 | |
| 1176 | AAAgatgcttcAGAG | PDCD1\|VTCN1 | |
| 1177 | CAAGcgcttcaCAG | TNFRSF14\|IDO1 | |
| 1178 | CAagcgcttcaCAG | TNFRSF14\|IDO1 | |
| 1179 | CAAGcgcttcACAG | TNFRSF14\|IDO1 | |
| 1180 | GGgcaggctccctGT | TNFRSF14\|VTCN1 | |
| 1181 | GGgcaggctcccTGT | TNFRSF14\|VTCN1 | |
| 1182 | GGGcaggctccctGT | TNFRSF14\|VTCN1 | |
| 1183 | CAggccctgccccCAG | TNFRSF14\|VTCN1 | |
| 1184 | CAggccctgcccccAG | TNFRSF14\|VTCN1 | |
| 1185 | CAGgccctgcccccAG | TNFRSF14\|VTCN1 | |
| 1186 | CCacagagctggcCC | TNFRSF14\|VTCN1 | |
| 1187 | CCAcagagctggcCC | TNFRSF14\|VTCN1 | |
| 1188 | CCacagagctggCCC | TNFRSF14\|VTCN1 | |
| 1189 | CCcacagagctggCCC | TNFRSF14\|VTCN1 | |
| 1190 | CCcacagagctggcCC | TNFRSF14\|VTCN1 | |
| 1191 | CCCacagagctggcCC | TNFRSF14\|VTCN1 | |
| 1192 | ACTCaggactTGAT | VTCN1\|CD274 | |
| 1193 | ACTcaggactTGAT | VTCN1\|CD274 | |
| 1194 | ACTCaggacttGAT | VTCN1\|CD274 | |
| 1195 | CACTcaggactTGAT | VTCN1\|CD274 | |
| 1196 | CACtcaggactTGAT | VTCN1\|CD274 | |
| 1197 | CACtcaggacttgAT | VTCN1\|CD274 | |
| 1198 | ACTCaggacttgaTG | VTCN1\|CD274 | |
| 1199 | ACTcaggacttGATG | VTCN1\|CD274 | |
| 1200 | ACTCaggacttGATG | VTCN1\|CD274 | |
| 1201 | CActcaggacttgaTG | VTCN1\|CD274 | |
| 1202 | CACTcaggacttgATG | VTCN1\|CD274 | |
| 1203 | CACTcaggacttGATG | VTCN1\|CD274 | |
| 1204 | CTCAggacttgATGG | VTCN1\|CD274 | |
| 1205 | CTCaggacttgATGG | VTCN1\|CD274 | |
| 1206 | CTCaggacttgatGG | VTCN1\|CD274 | |
| 1207 | ACTcaggacttgaTGG | VTCN1\|CD274 | |
| 1208 | ACtcaggacttgatGG | VTCN1\|CD274 | |
| 1209 | ACTCaggacttgATGG | VTCN1\|CD274 | |
| 1210 | CActcaggacttgatGG | VTCN1\|CD274 | |
| 1211 | CACTcaggacttgaTGG | VTCN1\|CD274 | |
| 1212 | CACtcaggacttgatGG | VTCN1\|CD274 | |
| 1213 | CACTcaggactTGA | VTCN1\|CD274 | |
| 1214 | CACTcaggacttGA | VTCN1\|CD274 | |
| 1215 | CACTcaggacTTGA | VTCN1\|CD274 | |
| 1216 | GCATtttcagaagAG | VTCN1\|IDO1 | |
| 1217 | GCAttttcagaAGAG | VTCN1\|IDO1 | |
| 1218 | GCATtttcagaAGAG | VTCN1\|IDO1 | |
| 1219 | TGCattttcagaAGAG | VTCN1\|IDO1 | |
| 1220 | TGCattttcagaagAG | VTCN1\|IDO1 | |
| 1221 | TGCAttttcagaAGAG | VTCN1\|IDO1 | |
| 1222 | TTgcattttcagaaGAG | VTCN1\|IDO1 | |
| 1223 | TTGcattttcagaAGAG | VTCN1\|IDO1 | |
| 1224 | TTGCattttcagaAGAG | VTCN1\|IDO1 | |
| 1225 | TTTGcattttcagaAGAG | VTCN1\|IDO1 | |
| 1226 | TTTGcattttcagaaGAG | VTCN1\|IDO1 | |
| 1227 | TTTgcattttcagaagAG | VTCN1\|IDO1 | |
| 1228 | TTGCattttcaGAAG | VTCN1\|IDO1 | |
| 1229 | TTGcattttcaGAAG | VTCN1\|IDO1 | |
| 1230 | TTGCattttcagAAG | VTCN1\|IDO1 | |
| 1231 | TTTgcattttcaGAAG | VTCN1\|IDO1 | |
| 1232 | TTTGcattttcagAAG | VTCN1\|IDO1 | |
| 1233 | TTTGcattttcaGAAG | VTCN1\|IDO1 | |
| 1234 | ACCTgtctggAAAC | VTCN1\|IDO1 | |
| 1235 | ACCtgtctggAAAC | VTCN1\|IDO1 | |
| 1236 | ACCTgtctggaAAC | VTCN1\|IDO1 | |
| 1237 | TTGCattttcagaAGA | VTCN1\|IDO1 | |
| 1238 | TTGCattttcagaAGA | VTCN1\|IDO1 | |
| 1239 | TTGCattttcagAAGA | VTCN1\|IDO1 | |
| 1240 | TTtgcattttcagAAGA | VTCN1\|IDO1 | |
| 1241 | TTTGcattttcagAAGA | VTCN1\|IDO1 | |
| 1242 | TTTGcattttcagaAGA | VTCN1\|IDO1 | |
| 1243 | GGATggctatgaGAA | VTCN1\|IDO1 | |
| 1244 | GGatggctatgaGAA | VTCN1\|IDO1 | |
| 1245 | GGATggctatgAGAA | VTCN1\|IDO1 | |
| 1246 | CTgccacccaggAGT | VTCN1\|LGALS9 | |
| 1247 | CTGccacccaggaGT | VTCN1\|LGALS9 | |
| 1248 | CTgccacccaggaGT | VTCN1\|LGALS9 | |
| 1249 | TGcctcattggcCT | VTCN1\|LGALS9 | |
| 1250 | TGCctcattggcCT | VTCN1\|LGALS9 | |
| 1251 | TGcctcattggCCT | VTCN1\|LGALS9 | |
| 1252 | CTgcctcattggCCT | VTCN1\|LGALS9 | |
| 1253 | CTgcctcattggcCT | VTCN1\|LGALS9 | |
| 1254 | CTGcctcattggcCT | VTCN1\|LGALS9 | |
| 1255 | ACtgcctcattggCCT | VTCN1\|LGALS9 | |
| 1256 | ACTgcctcattggcCT | VTCN1\|LGALS9 | |
| 1257 | ACtgcctcattggcCT | VTCN1\|LGALS9 | |
| 1258 | CTTTtagatgtTGG | VTCN1\|LGALS9 | |
| 1259 | CTTTtagatgTTGG | VTCN1\|LGALS9 | |
| 1260 | CTTttagatgTTGG | VTCN1\|LGALS9 | |
| 1261 | ACTGcctcattGGC | VTCN1\|LGALS9 | |
| 1262 | ACtgcctcattGGC | VTCN1\|LGALS9 | |
| 1263 | ACtgcctcattgGC | VTCN1\|LGALS9 | |
| 1264 | ACTgcctcattggCC | VTCN1\|LGALS9 | |
| 1265 | ACtgcctcattgGCC | VTCN1\|LGALS9 | |
| 1266 | ACtgcctcattggCC | VTCN1\|LGALS9 | |
| 1267 | TGgcttctttttgtTT | VTCN1\|PDCD1LG2 | |
| 1268 | TGGcttctttttgTTT | VTCN1\|PDCD1LG2 | |
| 1269 | TGGCttctttttGTTT | VTCN1\|PDCD1LG2 | |
| 1270 | CTgtctggaaaCCTT | VTCN1\|PDCD1LG2 | |
| 1271 | CTGtctggaaaccTT | VTCN1\|PDCD1LG2 | |
| 1272 | CTGTctggaaaCCTT | VTCN1\|PDCD1LG2 | |
| 1273 | CCTgtctggaaacCTT | VTCN1\|PDCD1LG2 | |
| 1274 | CCtgtctggaaacCTT | VTCN1\|PDCD1LG2 | |
| 1275 | CCtgtctggaaaccTT | VTCN1\|PDCD1LG2 | |
| 1276 | TCTGaggcagaATGT | VTCN1\|PDCD1LG2 | |
| 1277 | TCTGaggcagaaTGT | VTCN1\|PDCD1LG2 | |
| 1278 | TCTgaggcagaatGT | VTCN1\|PDCD1LG2 | |
| 1279 | TATggtgtatACGT | VTCN1\|PDCD1LG2 | |
| 1280 | TATGgtgtatACGT | VTCN1\|PDCD1LG2 | |
| 1281 | TATGgtgtataCGT | VTCN1\|PDCD1LG2 | |
| 1282 | CTATggtgtataCGT | VTCN1\|PDCD1LG2 | |
| 1283 | CTATggtgtatACGT | VTCN1\|PDCD1LG2 | |
| 1284 | CTatggtgtataCGT | VTCN1\|PDCD1LG2 | |
| 1285 | TCTAtggtgtatACGT | VTCN1\|PDCD1LG2 | |
| 1286 | TCTatggtgtatACGT | VTCN1\|PDCD1LG2 | |
| 1287 | TCTatggtgtatacGT | VTCN1\|PDCD1LG2 | |
| 1288 | TTCtatggtgtatACGT | VTCN1\|PDCD1LG2 | |
| 1289 | TTCtatggtgtatacGT | VTCN1\|PDCD1LG2 | |
| 1290 | TTCTatggtgtatACGT | VTCN1\|PDCD1LG2 | |
| 1291 | ATTctatggtgtataCGT | VTCN1\|PDCD1LG2 | |
| 1292 | ATTCtatggtgtatACGT | VTCN1\|PDCD1LG2 | |
| 1293 | ATtctatggtgtatacGT | VTCN1\|PDCD1LG2 | |
| 1294 | TAttctatggtgtatacGT | VTCN1\|PDCD1LG2 | |
| 1295 | TATTctatggtgtatACGT | VTCN1\|PDCD1LG2 | |
| 1296 | TAttctatggtgtataCGT | VTCN1\|PDCD1LG2 | |
| 1297 | GTAttctatggtgtatacGT | VTCN1\|PDCD1LG2 | |
| 1298 | GTattctatggtgtatacGT | VTCN1\|PDCD1LG2 | |
| 1299 | GTattctatggtgtatacGT | VTCN1\|PDCD1LG2 | |
| 1300 | GAgtccagatCAGT | VTCN1\|PDCD1LG2 | |
| 1301 | GAgtccagatcaGT | VTCN1\|PDCD1LG2 | |
| 1302 | GAGTccagatCAGT | VTCN1\|PDCD1LG2 | |
| 1303 | TGagtccagatcaGT | VTCN1\|PDCD1LG2 | |
| 1304 | TGagtccagatCAGT | VTCN1\|PDCD1LG2 | |
| 1305 | TGAgtccagatCAGT | VTCN1\|PDCD1LG2 | |
| 1306 | AAGGaagttattTCT | VTCN1\|PDCD1LG2 | |
| 1307 | AAGGaagttatTTCT | VTCN1\|PDCD1LG2 | |
| 1308 | AAGgaagttatTTCT | VTCN1\|PDCD1LG2 | |
| 1309 | GATttttgaaaTCCT | VTCN1\|PDCD1LG2 | |
| 1310 | GATTtttgaaaTCCT | VTCN1\|PDCD1LG2 | |
| 1311 | GATTtttgaaatCCT | VTCN1\|PDCD1LG2 | |
| 1312 | CAAcagtggaCCCT | VTCN1\|PDCD1LG2 | |
| 1313 | CAacagtggaccCT | VTCN1\|PDCD1LG2 | |
| 1314 | CAAcagtggacCCT | VTCN1\|PDCD1LG2 | |
| 1315 | CCTgtctggaaaCCT | VTCN1\|PDCD1LG2 | |
| 1316 | CCTgtctggaaacCT | VTCN1\|PDCD1LG2 | |
| 1317 | CCtgtctggaaacCT | VTCN1\|PDCD1LG2 | |
| 1318 | TGCCtctgaggaCT | VTCN1\|PDCD1LG2 | |
| 1319 | TGcctctgaggaCT | VTCN1\|PDCD1LG2 | |
| 1320 | TGCctctgaggaCT | VTCN1\|PDCD1LG2 | |
| 1321 | GGGTagttttGGAT | VTCN1\|PDCD1LG2 | |
| 1322 | GGGtagttttggAT | VTCN1\|PDCD1LG2 | |
| 1323 | GGGtagttttGGAT | VTCN1\|PDCD1LG2 | |
| 1324 | TAtggtgtataCGTG | VTCN1\|PDCD1LG2 | |
| 1325 | TATggtgtataCGTG | VTCN1\|PDCD1LG2 | |
| 1326 | TATGgtgtataCGTG | VTCN1\|PDCD1LG2 | |
| 1327 | CTATggtgtataCGTG | VTCN1\|PDCD1LG2 | |
| 1328 | CTATggtgtatacGTG | VTCN1\|PDCD1LG2 | |
| 1329 | CTAtggtgtatacgTG | VTCN1\|PDCD1LG2 | |
| 1330 | TCTAtggtgtatacgTG | VTCN1\|PDCD1LG2 | |
| 1331 | TCtatggtgtatacgTG | VTCN1\|PDCD1LG2 | |
| 1332 | TCTAtggtgtataCGTG | VTCN1\|PDCD1LG2 | |
| 1333 | TTctatggtgtatacgTG | VTCN1\|PDCD1LG2 | |
| 1334 | TTCTatggtgtataCGTG | VTCN1\|PDCD1LG2 | |
| 1335 | TTCtatggtgtatacGTG | VTCN1\|PDCD1LG2 | |
| 1336 | ATtctatggtgtatacgTG | VTCN1\|PDCD1LG2 | |
| 1337 | ATTctatggtgtataCGTG | VTCN1\|PDCD1LG2 | |
| 1338 | ATtctatggtgtatacGTG | VTCN1\|PDCD1LG2 | |
| 1339 | TAttctatggtgtatacGTG | VTCN1\|PDCD1LG2 | |
| 1340 | TAttctatggtgtatacgTG | VTCN1\|PDCD1LG2 | |
| 1341 | TATTctatggtgtatacGTG | VTCN1\|PDCD1LG2 | |
| 1342 | TCTgaggCagAATG | VTCN1\|PDCD1LG2 | |
| 1343 | TCTGaggcagAATG | VTCN1\|PDCD1LG2 | |
| 1344 | TCTGaggcagaATG | VTCN1\|PDCD1LG2 | |
| 1345 | CTAtggtgtaTACG | VTCN1\|PDCD1LG2 | |
| 1346 | CTATggtgtatACG | VTCN1\|PDCD1LG2 | |
| 1347 | CTATggtgtaTACG | VTCN1\|PDCD1LG2 | |
| 1348 | TCTAtggtgtaTACG | VTCN1\|PDCD1LG2 | |
| 1349 | TCTatggtgtaTACG | VTCN1\|PDCD1LG2 | |
| 1350 | TCTAtggtgtataCG | VTCN1\|PDCD1LG2 | |
| 1351 | TTCtatggtgtaTACG | VTCN1\|PDCD1LG2 | |
| 1352 | TTCTatggtgtaTACG | VTCN1\|PDCD1LG2 | |
| 1353 | TTCtatggtgtaTACG | VTCN1\|PDCD1LG2 | |
| 1354 | ATTCtatggtgtaTACG | VTCN1\|PDCD1LG2 | |
| 1355 | ATTCtatggtgtaTACG | VTCN1\|PDCD1LG2 | |
| 1356 | ATTctatggtgtatACG | VTCN1\|PDCD1LG2 | |
| 1357 | TAttctatggtgtatACG | VTCN1\|PDCD1LG2 | |
| 1358 | TATTctatggtgtaTACG | VTCN1\|PDCD1LG2 | |
| 1359 | TATtctatggtgtaTACG | VTCN1\|PDCD1LG2 | |
| 1360 | GTAttctatggtgtataCG | VTCN1\|PDCD1LG2 | |
| 1361 | GTAttctatggtgtaTACG | VTCN1\|PDCD1LG2 | |
| 1362 | GTattctatggtgtataCG | VTCN1\|PDCD1LG2 | |
| 1363 | AGtattctatggtgtataCG | VTCN1\|PDCD1LG2 | |
| 1364 | AGtattctatggtgtatACG | VTCN1\|PDCD1LG2 | |
| 1365 | AGTAttctatggtgtataCG | VTCN1\|PDCD1LG2 | |
| 1366 | GCATtgcactTTAG | VTCN1\|PDCD1LG2 | |
| 1367 | GCATtgcacttTAG | VTCN1\|PDCD1LG2 | |
| 1368 | GCattgcacttTAG | VTCN1\|PDCD1LG2 | |
| 1369 | TGAgtccagatcAG | VTCN1\|PDCD1LG2 | |
| 1370 | TGAGtccagatCAG | VTCN1\|PDCD1LG2 | |
| 1371 | TGAGtccagaTCAG | VTCN1\|PDCD1LG2 | |
| 1372 | TGAgagatgtTATC | VTCN1\|PDCD1LG2 | |
| 1373 | TGAGagatgtTATC | VTCN1\|PDCD1LG2 | |
| 1374 | TGAGagatgttATC | VTCN1\|PDCD1LG2 | |
| 1375 | CTGagagatgtTATC | VTCN1\|PDCD1LG2 | |
| 1376 | CTGAgagatgttATC | VTCN1\|PDCD1LG2 | |
| 1377 | CTGAgagatgtTATC | VTCN1\|PDCD1LG2 | |
| 1378 | TATGgtgtatacgTGC | VTCN1\|PDCD1LG2 | |
| 1379 | TAtggtgtatacGTGC | VTCN1\|PDCD1LG2 | |
| 1380 | TAtggtgtatacgtGC | VTCN1\|PDCD1LG2 | |
| 1381 | CTatggtgtatacgtGC | VTCN1\|PDCD1LG2 | |
| 1382 | CTatggtgtatacGTGC | VTCN1\|PDCD1LG2 | |
| 1383 | CTAtggtgtatacgtGC | VTCN1\|PDCD1LG2 | |
| 1384 | TCTAtggtgtatacgtGC | VTCN1\|PDCD1LG2 | |
| 1385 | TCTatggtgtatacgtGC | VTCN1\|PDCD1LG2 | |
| 1386 | TCtatggtgtatacgtGC | VTCN1\|PDCD1LG2 | |
| 1387 | TTctatggtgtatacgtGC | VTCN1\|PDCD1LG2 | |
| 1388 | TTctatggtgtatacgTGC | VTCN1\|PDCD1LG2 | |
| 1389 | TTCtatggtgtatacgtGC | VTCN1\|PDCD1LG2 | |
| 1390 | ATtctatggtgtatacgTGC | VTCN1\|PDCD1LG2 | |
| 1391 | ATtctatggtgtatacgtGC | VTCN1\|PDCD1LG2 | |
| 1392 | ATTCtatggtgtatacgtGC | VTCN1\|PDCD1LG2 | |
| 1393 | TATggtgtatacgtgCC | VTCN1\|PDCD1LG2 | |
| 1394 | TAtggtgtatacgtGCC | VTCN1\|PDCD1LG2 | |
| 1395 | TAtggtgtatacgtgCC | VTCN1\|PDCD1LG2 | |
| 1396 | CTatggtgtatacgtgCC | VTCN1\|PDCD1LG2 | |
| 1397 | CTatggtgtatacgtGCC | VTCN1\|PDCD1LG2 | |
| 1398 | CTAtggtgtatacgtgCC | VTCN1\|PDCD1LG2 | |
| 1399 | TCtatggtgtatacgtGCC | VTCN1\|PDCD1LG2 | |
| 1400 | TCTatggtgtatacgtgCC | VTCN1\|PDCD1LG2 | |
| 1401 | TCtatggtgtatacgtgCC | VTCN1\|PDCD1LG2 | |
| 1402 | TTctatggtgtatacgtgCC | VTCN1\|PDCD1LG2 | |
| 1403 | TTctatggtgtatacgtGCC | VTCN1\|PDCD1LG2 | |
| 1404 | TTCtatggtgtatacgtgCC | VTCN1\|PDCD1LG2 | |
| 1405 | TATTctatggtgtATAC | VTCN1\|PDCD1LG2 | |
| 1406 | TATtctatggtgtaTAC | VTCN1\|PDCD1LG2 | |
| 1407 | TATtctatggtgtATAC | VTCN1\|PDCD1LG2 | |
| 1408 | GTATtctatggtgtATAC | VTCN1\|PDCD1LG2 | |
| 1409 | GTAttctatggtgtATAC | VTCN1\|PDCD1LG2 | |
| 1410 | GTattctatggtgtatAC | VTCN1\|PDCD1LG2 | |
| 1411 | AGtattctatggtgtatAC | VTCN1\|PDCD1LG2 | |
| 1412 | AGTAttctatggtgtATAC | VTCN1\|PDCD1LG2 | |
| 1413 | AGtattctatggtgtATAC | VTCN1\|PDCD1LG2 | |
| 1414 | TAgtattctatggtgtaTAC | VTCN1\|PDCD1LG2 | |
| 1415 | TAgtattctatggtgtatAC | VTCN1\|PDCD1LG2 | |
| 1416 | TAGTattctatggtgtaTAC | VTCN1\|PDCD1LG2 | |
| 1417 | TAtggtgtatacgtgccAC | VTCN1\|PDCD1LG2 | |
| 1418 | TATggtgtatacgtgccAC | VTCN1\|PDCD1LG2 | |
| 1419 | TAtggtgtatacgtgcCAC | VTCN1\|PDCD1LG2 | |
| 1420 | CTAtggtgtatacgtgccAC | VTCN1\|PDCD1LG2 | |
| 1421 | CTatggtgtatacgtgccAC | VTCN1\|PDCD1LG2 | |
| 1422 | CTatggtgtatacgtgcCAC | VTCN1\|PDCD1LG2 | |
| 1423 | ACTAtgcatttGTTA | VTCN1\|PDCD1LG2 | |
| 1424 | ACTAtgcatttgTTA | VTCN1\|PDCD1LG2 | |
| 1425 | ACTatgcatttGTTA | VTCN1\|PDCD1LG2 | |
| 1426 | AAAttcagaaaaCATA | VTCN1\|PDCD1LG2 | |
| 1427 | AAATtcagaaaaCATA | VTCN1\|PDCD1LG2 | |
| 1428 | AAattcagaaaaCATA | VTCN1\|PDCD1LG2 | |
| 1429 | TAtggtgtatacgtgCCA | VTCN1\|PDCD1LG2 | |
| 1430 | TATggtgtatacgtgcCA | VTCN1\|PDCD1LG2 | |
| 1431 | TAtggtgtatacgtgcCA | VTCN1\|PDCD1LG2 | |
| 1432 | CTAtggtgtatacgtgcCA | VTCN1\|PDCD1LG2 | |
| 1433 | CTatggtgtatacgtgcCA | VTCN1\|PDCD1LG2 | |
| 1434 | CTatggtgtatacgtgCCA | VTCN1\|PDCD1LG2 | |
| 1435 | TCtatggtgtatacgtgcCA | VTCN1\|PDCD1LG2 | |
| 1436 | TCtatggtgtatacgtgCCA | VTCN1\|PDCD1LG2 | |
| 1437 | TCTatggtgtatacgtgcCA | VTCN1\|PDCD1LG2 | |
| 1438 | ACctgagtgtTACA | VTCN1\|PDCD1LG2 | |
| 1439 | ACCTgagtgtTACA | VTCN1\|PDCD1LG2 | |
| 1440 | ACCtgagtgtTACA | VTCN1\|PDCD1LG2 | |
| 1441 | TATggtgtatacgtgccaCA | VTCN1\|PDCD1LG2 | |
| 1442 | TAtggtgtatacgtgccaCA | VTCN1\|PDCD1LG2 | |
| 1443 | TAtggtgtatacgtgccACA | VTCN1\|PDCD1LG2 | |
| 1444 | ACTAtgcatttgtTAA | VTCN1\|PDCD1LG2 | |
| 1445 | ACTAtgcatttgTTAA | VTCN1\|PDCD1LG2 | |
| 1446 | ACTatgcatttgTTAA | VTCN1\|PDCD1LG2 | |
| 1447 | CTATgcatttgtTAAA | VTCN1\|PDCD1LG2 | |
| 1448 | CTATgcatttgttAAA | VTCN1\|PDCD1LG2 | |
| 1449 | CTAtgcatttgtTAAA | VTCN1\|PDCD1LG2 | |
| 1450 | ACTAtgcatttgttAAA | VTCN1\|PDCD1LG2 | |
| 1451 | ACTatgcatttgtTAAA | VTCN1\|PDCD1LG2 | |
| 1452 | ACTAtgcatttgtTAAA | VTCN1\|PDCD1LG2 | |
| 1453 | CTATgcatttgttaaAA | VTCN1\|PDCD1LG2 | |
| 1454 | CTATgcatttgttaAAA | VTCN1\|PDCD1LG2 | |
| 1455 | CTATgcatttgttAAAA | VTCN1\|PDCD1LG2 | |
| 1456 | ACTAtgcatttgttaaAA | VTCN1\|PDCD1LG2 | |
| 1457 | ACTAtgcatttgttaAAA | VTCN1\|PDCD1LG2 | |
| 1458 | ACTAtgcatttgttAAAA | VTCN1\|PDCD1LG2 | |
| 1459 | AAATggagcaatTGTAC | IDO1\|PDCD1LG2 | CRM0140 |
| 1460 | ACTGaggaatacggaAG | CD274\|CTLA4 | CRM0141 |
| 1461 | AGTttggcgacaaAATT | CD274\|PDCD1LG2 | CRM0142 |
| 1462 | CAggaacactagaggGT | PDCD1\|PDCD1LG2 | CRM0143 |
| 1463 | CATgaggaatacgGAAG | CD274\|CTLA4 | CRM0144 |
| 1464 | CCtacagggaaagtGAA | CD274\|PDCD1LG2 | CRM0145 |
| 1465 | CCTtaagatacTGTT | CD274\|IDO1\| | CRM0146 |
| | | PDCD1LG2 | |
| 1466 | CTgcacgtccagcCC | IDO1\|PDCD1\| | CRM0147 |
| | | PDCD1LG2 | |
| 1467 | CTTtggttgattttgTTG | CD274\|PDCD1LG2 | CRM0148 |
| 1468 | GAcagtgcatctagCT | IDO1\|PDCD1LG2 | CRM0149 |
| 1469 | GAggaatacggaagTCA | CD274\|CTLA4 | CRM0150 |
| 1470 | GTgggttgatgagagAG | PDCD1\|PDCD1LG2 | CRM0151 |
| 1471 | TCtgcgaggtagatgTT | IDO1\|PDCD1LG2 | CRM0152 |
| 1472 | TGaggaatacggaagCC | CD274\|CTLA4 | CRM0153 |

TABLE 3.2

| SEQ ID NO | Oligonucleotide (5′-3′) | targets | oligoID |
|---|---|---|---|
| 2002 | CCctttccttttctttTT | VSIR\|PDCD1LG2 | |
| 2003 | CCctttccttttcttTTT | VSIR\|PDCD1LG2 | |
| 2004 | CCctttccttttctTTTT | VSIR\|PDCD1LG2 | |
| 2005 | GCtgtcaccttgattTT | HAVCR2\|KIR2DL1\|KIR2DL3 | |
| 2006 | GCtgtcaccttgatTTT | HAVCR2\|KIR2DL1\|KIR2DL3 | |
| 2007 | GCTgtcaccttgatTTT | HAVCR2\|KIR2DL1\|KIR2DL3 | |
| 2008 | GAttctgagggcTTT | KIR2DL3\|TIGIT | |
| 2009 | GAttctgagggCTTT | KIR2DL3\|TIGIT | |
| 2010 | GATTctgagggCTTT | KIR2DL3\|TIGIT | |
| 2011 | GGattctgagggctTT | KIR2DL3\|TIGIT | |
| 2012 | GGAttctgagggctTT | KIR2DL3\|TIGIT | |
| 2013 | GGATtctgagggcTTT | KIR2DL3\|TIGIT | |
| 2014 | ACTGatacatccTTT | CD274\|VSIR | |
| 2015 | ACTgatacatcCTTT | CD274\|VSIR | |
| 2016 | ACTGatacatcCTTT | CD274\|VSIR | |
| 2017 | AACtgatacatcCTTT | CD274\|VSIR | |
| 2018 | AACTgatacatccTTT | CD274\|VSIR | |
| 2019 | AACTgatacatcCTTT | CD274\|VSIR | |
| 2020 | CACttcactcacTTT | VTCN1\|VSIR | |
| 2021 | CACTtcactcacTTT | VTCN1\|VSIR | |
| 2022 | CACTtcactcaCTTT | VTCN1\|VSIR | |
| 2023 | CCacttcactcactTT | VTCN1\|VSIR | |
| 2024 | CCActtcactcacTTT | VTCN1\|VSIR | |
| 2025 | CCActtcactcaCTTT | VTCN1\|VSIR | |
| 2026 | ACctgctgcaggT | NT5E\|VTCN1 | |
| 2027 | ACCtgctgcaggTT | NT5E\|VTCN1 | |
| 2028 | ACCtgctgcagGTT | NT5E\|VTCN1 | |
| 2029 | CAGagttgttttCTT | NT5E\|PDCD1LG2 | |
| 2030 | CAGagttgtttTCTT | NT5E\|PDCD1LG2 | |
| 2031 | CAGAgttgtttTCTT | NT5E\|PDCD1LG2 | |
| 2032 | GAttctgagggCTT | NT5E\|KIR2DL3\|TIGIT | |
| 2033 | GAttctgaggGCTT | NT5E\|KIR2DL3\|TIGIT | |
| 2034 | GATTctgaggGCTT | NT5E\|KIR2DL3\|TIGIT | |
| 2035 | GGattctgagggcTT | KIR2DL3\|TIGIT | |
| 2036 | GGattctgagggcTT | KIR2DL3\|TIGIT | |
| 2037 | GGATtctgagggCTT | KIR2DL3\|TIGIT | |
| 2038 | GCagagcctcttccTT | PDCD1\|KIR2DL3 | |
| 2039 | GCagagcctcttcCTT | PDCD1\|KIR2DL3 | |
| 2040 | GCAgagcctcttccTT | PDCD1\|KIR2DL3 | |
| 2041 | ACTGatacatcCTT | CD274\|VSIR | |
| 2042 | ACTgatacatCCTT | CD274\|VSIR | |
| 2043 | ACTGatacatCCTT | CD274\|VSIR | |
| 2044 | AACTgatacatcCTT | CD274\|VSIR | |
| 2045 | AACtgatacatCCTT | CD274\|VSIR | |
| 2046 | AACTgatacatCCTT | CD274\|VSIR | |
| 2047 | ACacctctgccccTT | NT5E\|VSIR | |
| 2048 | ACAcctctgccccTT | NT5E\|VSIR | |
| 2049 | ACacctctgcccCTT | NT5E\|VSIR | |
| 2050 | GGtcctgggccccTT | NT5E\|CD276 | |
| 2051 | GGtcctgggcccCTT | NT5E\|CD276 | |
| 2052 | GGTcctgggccccTT | NT5E\|CD276 | |
| 2053 | TGgtcctgggccccTT | NT5E\|CD276 | |
| 2054 | TGGtcctgggccccTT | NT5E\|CD276 | |
| 2055 | TGgtcctgggcccCTT | NT5E\|CD276 | |
| 2056 | GTggtcctgggccccTT | NT5E\|CD276 | |
| 2057 | GTggtcctgggcccCTT | NT5E\|CD276 | |
| 2058 | GTGgtcctgggccccTT | NT5E\|CD276 | |
| 2059 | CCacttcactcacTT | VTCN1\|VSIR | |
| 2060 | CCACttcactcacTT | VTCN1\|VSIR | |
| 2061 | CCACttcactcACTT | VTCN1\|VSIR | |
| 2062 | ATaattctttgtTATT | VTCN1\|TIGIT | |
| 2063 | ATAattctttgtTATT | VTCN1\|TIGIT | |
| 2064 | ATAAttctttgtTATT | VTCN1\|TIGIT | |
| 2065 | ATTCattacacatATT | NT5E\|PDCD1LG2 | |
| 2066 | ATTcattacacaTATT | NT5E\|PDCD1LG2 | |
| 2067 | ATTCattacacaTATT | NT5E\|PDCD1LG2 | |
| 2068 | TCCagggaaaaGATT | HAVCR2\|TDO2 | |
| 2069 | TCCAgggaaaagATT | HAVCR2\|TDO2 | |
| 2070 | TCCAgggaaaaGATT | HAVCR2\|TDO2 | |
| 2071 | TTCcagggaaaaGATT | HAVCR2\|TDO2 | |
| 2072 | TTCCagggaaaagATT | HAVCR2\|TDO2 | |
| 2073 | TTCCagggaaaaGATT | HAVCR2\|TDO2 | |
| 2074 | GTaactttatCATT | NT5E\|CD274 | |
| 2075 | GTAactttatCATT | NT5E\|CD274 | |
| 2076 | GTAActttatCATT | NT5E\|CD274 | |
| 2077 | GTAtttttatgAATT | VTCN1\|TDO2 | |
| 2078 | GTATttttatgaATT | VTCN1\|TDO2 | |
| 2079 | GTATttttatgAATT | VTCN1\|TDO2 | |
| 2080 | CCatgctcctatGT | NT5E\|CD276 | |
| 2081 | CCatgctcctaTGT | NT5E\|CD276 | |
| 2082 | CCAtgctcctATGT | NT5E\|CD276 | |
| 2083 | GCcatgctcctatGT | NT5E\|CD276 | |
| 2084 | GCcatgctcctaTGT | NT5E\|CD276 | |
| 2085 | GCCatgctcctatGT | NT5E\|CD276 | |
| 2086 | TGccatgctcctatGT | NT5E\|CD276 | |
| 2087 | TGccatgctcctaTGT | NT5E\|CD276 | |
| 2088 | TGCcatgctcctatGT | NT5E\|CD276 | |
| 2089 | CTtcagttgctgGT | PDCD1LG2\|TIGIT | |
| 2090 | CTTcagttgctGGT | PDCD1LG2\|TIGIT | |
| 2091 | CTTCagttgcTGGT | PDCD1LG2\|TIGIT | |
| 2092 | GGccttggactgGT | CD86\|TIGIT | |
| 2093 | GGccttggactGGT | CD86\|TIGIT | |
| 2094 | GGCcttggactgGT | CD86\|TIGIT | |
| 2095 | TTCaaagtcatTTCT | NT5E\|CD86 | |
| 2096 | TTCAaagtcattTCT | NT5E\|CD86 | |
| 2097 | TTCAaagtcatTTCT | NT5E\|CD86 | |
| 2098 | CAaaatgcatgTTCT | CEACAM1\|VSIR | |
| 2099 | CAAaatgcatgTTCT | CEACAM1\|VSIR | |
| 2100 | CAAAatgcatgTTCT | CEACAM1\|VSIR | |
| 2101 | CCaaaatgcatgtTCT | CEACAM1\|VSIR | |
| 2102 | CCAaaatgcatgtTCT | CEACAM1\|VSIR | |
| 2103 | CCAAaatgcatgTTCT | CEACAM1\|VSIR | |
| 2104 | TCatccgtgtgtCT | NT5E\|CD86 | |
| 2105 | TCATccgtgtgtCT | NT5E\|CD86 | |
| 2106 | TCATccgtgtGTCT | NT5E\|CD86 | |
| 2107 | GGcctgtgccgtCT | VSIR\|LGALS9 | |
| 2108 | GGcctgtgccgTCT | VSIR\|LGALS9 | |
| 2109 | GGCctgtgccgtCT | VSIR\|LGALS9 | |
| 2110 | TGgcctgtgccgtCT | VSIR\|LGALS9 | |
| 2111 | TGgcctgtgccgTCT | VSIR\|LGALS9 | |
| 2112 | TGGcctgtgccgtCT | VSIR\|LGALS9 | |
| 2113 | CTttcttccttttctCT | CEACAM1\|NT5E | |
| 2114 | CTTTcttccttttctCT | CEACAM1\|NT5E | |
| 2115 | CTTTcttccttttcTCT | CEACAM1\|NT5E | |
| 2116 | GCttggacatctCT | CD86\|VSIR | |
| 2117 | GCTTggacatctCT | CD86\|VSIR | |
| 2118 | GCTTggacatCTCT | CD86\|VSIR | |
| 2119 | TATcttctctttgCT | HAVCR2\|PDCD1LG2 | |
| 2120 | TAtcttctcttTGCT | HAVCR2\|PDCD1LG2 | |
| 2121 | TATCttctcttTGCT | HAVCR2\|PDCD1LG2 | |
| 2122 | ATcacacccatggCT | NT5E\|TNFRSF14 | |
| 2123 | ATCacacccatggCT | NT5E\|TNFRSF14 | |
| 2124 | ATCAcacccatggCT | NT5E\|TNFRSF14 | |
| 2125 | CAtcacacccatggCT | NT5E\|TNFRSF14 | |
| 2126 | CATcacacccatggCT | NT5E\|TNFRSF14 | |
| 2127 | CAtcacacccatgGCT | NT5E\|TNFRSF14 | |
| 2128 | TCatcacacccatggCT | NT5E\|TNFRSF14 | |
| 2129 | TCAtcacacccatggCT | NT5E\|TNFRSF14 | |
| 2130 | TCatcacacccatgGCT | NT5E\|TNFRSF14 | |
| 2131 | TCtgggctgtgggCT | VTCN1\|VSIR | |
| 2132 | TCTgggctgtgggCT | VTCN1\|VSIR | |
| 2133 | TCtgggctgtggGCT | VTCN1\|VSIR | |
| 2134 | ATgtcataggaGCT | KIR2DL1\|KIR2DL3\|TDO2 | |
| 2135 | ATGtcataggAGCT | KIR2DL1\|KIR2DL3\|TDO2 | |
| 2136 | ATGTcataggAGCT | KIR2DL1\|KIR2DL3\|TDO2 | |
| 2137 | TGcctgtgaggagCT | PDCD1LG2\|TDO2 | |
| 2138 | TGcctgtgaggaGCT | PDCD1LG2\|TDO2 | |
| 2139 | TGCctgtgaggagCT | PDCD1LG2\|TDO2 | |
| 2140 | TTgcctgtgaggagCT | PDCD1LG2\|TDO2 | CRM0284 |
| 2141 | TTGcctgtgaggagCT | PDCD1LG2\|TDO2 | |
| 2142 | TTgcctgtgaggaGCT | PDCD1LG2\|TDO2 | |
| 2143 | AGcatcagatttcCT | HAVCR2\|CD276 | |
| 2144 | AGcatcagatttCCT | HAVCR2\|CD276 | |
| 2145 | AGCatcagattTCCT | HAVCR2\|CD276 | |
| 2146 | ATccaattttaTCCT | NT5E\|CD86 | |
| 2147 | ATCcaattttaTCCT | NT5E\|CD86 | |
| 2148 | ATCCaattttaTCCT | NT5E\|CD86 | |
| 2149 | AACtgatacaTCCT | CD274\|VSIR | |
| 2150 | AACTgatacatCCT | CD274\|VSIR | |
| 2151 | AACTgatacaTCCT | CD274\|VSIR | |
| 2152 | GCctccagctctgcCT | NT5E\|PDCD1 | |
| 2153 | GCCtccagctctgcCT | NT5E\|PDCD1 | |
| 2154 | GCctccagctctgCCT | NT5E\|PDCD1 | |
| 2155 | TGgtcctgggcccCT | NT5E\|CD276 | |
| 2156 | TGGtcctgggcccCT | NT5E\|CD276 | |
| 2157 | TGgtcctgggccCCT | NT5E\|CD276 | |
| 2158 | GTggtcctgggcccCT | NT5E\|CD276 | |
| 2159 | GTGgtcctgggcccCT | NT5E\|CD276 | |
| 2160 | GTggtcctgggccCCT | NT5E\|CD276 | |
| 2161 | GGcaggagccccCT | LAG3\|CD276 | |
| 2162 | GGcaggagcccCCT | LAG3\|CD276 | |
| 2163 | GGCaggagccccCT | LAG3\|CD276 | |
| 2164 | TATgtaaccccaCT | VTCN1\|VSIR | |
| 2165 | TATGtaaccccACT | VTCN1\|VSIR | |
| 2166 | TATGtaacccCACT | VTCN1\|VSIR | |
| 2167 | TTatgtaaccccACT | VTCN1\|VSIR | |
| 2168 | TTATgtaaccccaCT | VTCN1\|VSIR | |
| 2169 | TTATgtaacccCACT | VTCN1\|VSIR | |
| 2170 | GTtatgtaaccccaCT | VTCN1\|VSIR | |
| 2171 | GTTatgtaaccccaCT | VTCN1\|VSIR | |
| 2172 | GTTAtgtaaccccACT | VTCN1\|VSIR | |
| 2173 | AGttatgtaaccccaCT | VTCN1\|VSIR | |
| 2174 | AGTtatgtaaccccaCT | VTCN1\|VSIR | |
| 2175 | AGttatgtaacccCACT | VTCN1\|VSIR | |
| 2176 | CAgttatgtaaccccaCT | VTCN1\|VSIR | |
| 2177 | CAgttatgtaaccccACT | VTCN1\|VSIR | |
| 2178 | CAGttatgtaaccccaCT | VTCN1\|VSIR | |
| 2179 | CCtgtgactacACT | CD86\|KIR2DL1 | |
| 2180 | CCTGtgactacaCT | CD86\|KIR2DL1 | |
| 2181 | CCTGtgactaCACT | CD86\|KIR2DL1 | |
| 2182 | GGAAtacttcaaACT | VTCN1\|TDO2 | |
| 2183 | GGAatacttcaAACT | VTCN1\|TDO2 | |
| 2184 | GGAAtacttcaAACT | VTCN1\|TDO2 | |
| 2185 | TACattattttgtTTAT | NT5E\|VTCN1 | |
| 2186 | TACAttattttgttTAT | NT5E\|VTCN1 | |
| 2187 | TACAttattttgtTTAT | NT5E\|VTCN1 | |
| 2188 | CGGcaaacatTTAT | NT5E\|VTCN1 | |
| 2189 | CGGCaaacattTAT | NT5E\|VTCN1 | |
| 2190 | CGGCaaacatTTAT | NT5E\|VTCN1 | |
| 2191 | TGccatgctcctAT | NT5E\|CD276 | |
| 2192 | TGCcatgctcctAT | NT5E\|CD276 | |
| 2193 | TGCCatgctcctAT | NT5E\|CD276 | |
| 2194 | TCAAttgatcaTAT | PDCD1LG2\|TDO2 | |
| 2195 | TCAattgatcATAT | PDCD1LG2\|TDO2 | |
| 2196 | TCAAttgatcATAT | PDCD1LG2\|TDO2 | |
| 2197 | ATCaattgatcATAT | PDCD1LG2\|TDO2 | |
| 2198 | ATCAattgatcaTAT | PDCD1LG2\|TDO2 | |
| 2199 | ATCAattgatcATAT | PDCD1LG2\|TDO2 | |
| 2200 | ATTcattacacATAT | NT5E\|PDCD1LG2 | |
| 2201 | ATTCattacacaTAT | NT5E\|PDCD1LG2 | |
| 2202 | ATTCattacacATAT | NT5E\|PDCD1LG2 | |
| 2203 | TTTGtatattgGAT | NT5E\|CD80 | |
| 2204 | TTTgtatattGGAT | NT5E\|CD80 | |
| 2205 | TTTGtatattGGAT | NT5E\|CD80 | |
| 2206 | CATGccaagaggAT | VTCN1\|TDO2 | |
| 2207 | CATGccaagagGAT | VTCN1\|TDO2 | |
| 2208 | CATGccaagaGGAT | VTCN1\|TDO2 | |
| 2209 | TTCcagggaaaAGAT | HAVCR2\|TDO2 | |
| 2210 | TTCCagggaaaaGAT | HAVCR2\|TDO2 | |
| 2211 | TTCCagggaaaAGAT | HAVCR2\|TDO2 | |
| 2212 | GAAcctggaggtcAT | NT5E\|VTCN1 | |
| 2213 | GAAcctggaggtCAT | NT5E\|VTCN1 | |
| 2214 | GAACctggaggTCAT | NT5E\|VTCN1 | |
| 2215 | TTActcatacTCAT | CD86\|TDO2 | |
| 2216 | TTACtcatactCAT | CD86\|TDO2 | |
| 2217 | TTACtcatacTCAT | CD86\|TDO2 | |
| 2218 | ATATcttatatcCAT | CD86\|KIR2DL1\|KIR2DL3 | |
| 2219 | ATAtcttatatCCAT | CD86\|KIR2DL1\|KIR2DL3 | |
| 2220 | ATATcttatatCCAT | CD86\|KIR2DL1\|KIR2DL3 | |
| 2221 | ACcccctccccacAT | CEACAM1\|CD80 | |
| 2222 | ACcccctccccaCAT | CEACAM1\|CD80 | |
| 2223 | ACCccctccccacAT | CEACAM1\|CD80 | |
| 2224 | AAccccctccccacAT | CEACAM1\|CD80 | |
| 2225 | AACcccctccccacAT | CEACAM1\|CD80 | |
| 2226 | AAccccctccccaCAT | CEACAM1\|CD80 | |
| 2227 | TGGGaaatgggtAAT | KIR2DL3\|CD274 | |
| 2228 | TGGgaaatgggTAAT | KIR2DL3\|CD274 | |
| 2229 | TGGGaaatgggTAAT | KIR2DL3\|CD274 | |
| 2230 | CTGggaaatgggtAAT | KIR2DL3\|CD274 | |
| 2231 | CTGGgaaatgggtAAT | KIR2DL3\|CD274 | |
| 2232 | CTGGgaaatgggTAAT | KIR2DL3\|CD274 | |
| 2233 | ACTCtctagagAAT | VTCN1\|VSIR | |
| 2234 | ACTctctagaGAAT | VTCN1\|VSIR | |
| 2235 | ACTCtctagaGAAT | VTCN1\|VSIR | |
| 2236 | TTttccttgtaCAAT | NT5E\|CD80 | |
| 2237 | TTTtccttgtaCAAT | NT5E\|CD80 | |
| 2238 | TTTTccttgtaCAAT | NT5E\|CD80 | |
| 2239 | ATtttccttgtaCAAT | NT5E\|CD80 | |
| 2240 | ATTttccttgtaCAAT | NT5E\|CD80 | |
| 2241 | ATTTtccttgtaCAAT | NT5E\|CD80 | |
| 2242 | AAttttccttgtaCAAT | NT5E\|CD80 | |
| 2243 | AATtttccttgtaCAAT | NT5E\|CD80 | |
| 2244 | AATTttccttgtaCAAT | NT5E\|CD80 | |
| 2245 | TAATtttccttgtacAAT | NT5E\|CD80 | |
| 2246 | TAAttttccttgtaCAAT | NT5E\|CD80 | |
| 2247 | TAATtttccttgtaCAAT | NT5E\|CD80 | |
| 2248 | CTaattttccttgtacaAT | NT5E\|CD80 | |
| 2249 | CTAAttttccttgtacAAT | NT5E\|CD80 | |
| 2250 | CTAAttttccttgtaCAAT | NT5E\|CD80 | |
| 2251 | TCTcttgcctcaaAT | KIR2DL1\|PDCD1LG2 | |
| 2252 | TCTCttgcctcaaAT | KIR2DL1\|PDCD1LG2 | |
| 2253 | TCTCttgcctcAAAT | KIR2DL1\|PDCD1LG2 | |
| 2254 | ATATacatttacaaAT | HAVCR2\|VTCNl | |
| 2255 | ATATacatttacaAAT | HAVCR2\|VTCNl | |
| 2256 | ATATacatttacAAAT | HAVCR2\|VTCNl | |
| 2257 | ACCttagacaTTTG | CD80\|KIR2DL1\|KIR2DL3 | |
| 2258 | ACCTtagacatTTG | CD80\|KIR2DL1\|KIR2DL3 | |
| 2259 | ACCTtagacaTTTG | CD80\|KIR2DL1\|KIR2DL3 | |
| 2260 | TTgacctcagctcTG | CEACAM1\|CD86 | |
| 2261 | TTGacctcagctCTG | CEACAM1\|CD86 | |
| 2262 | TTGAcctcagctCTG | CEACAM1\|CD86 | |
| 2263 | TTCtttctgtggcTG | HAVCR2\|VTCNl | |
| 2264 | TTCtttctgtggCTG | HAVCR2\|VTCNl | |
| 2265 | TTCtttctgtgGCTG | HAVCR2\|VTCNl | |
| 2266 | ACAatctagcccTG | CEACAM1\|NT5E | |
| 2267 | ACAAtctagccCTG | CEACAM1\|NT5E | |
| 2268 | ACAAtctagcCCTG | CEACAM1\|NT5E | |
| 2269 | CATTattttgtttATG | NT5E\|VTCNl | |
| 2270 | CATtattttgttTATG | NT5E\|VTCNl | |
| 2271 | CATTattttgttTATG | NT5E\|VTCNl | |
| 2272 | ACATtattttgtttATG | NT5E\|VTCN1 | |
| 2273 | ACAttattttgttTATG | NT5E\|VTCN1 | |
| 2274 | ACATtattttgttTATG | NT5E\|VTCN1 | |
| 2275 | TACAttattttgtttATG | NT5E\|VTCN1 | |
| 2276 | TACattattttgttTATG | NT5E\|VTCN1 | |
| 2277 | TACAttattttgttTATG | NT5E\|VTCN1 | |
| 2278 | GCcatgctcctaTG | NT5E\|CD276 | |
| 2279 | GCCatgctcctaTG | NT5E\|CD276 | |
| 2280 | GCCAtgctcctaTG | NT5E\|CD276 | |
| 2281 | TGccatgctcctaTG | NT5E\|CD276 | |
| 2282 | TGccatgctcctATG | NT5E\|CD276 | |
| 2283 | TGCcatgctcctATG | NT5E\|CD276 | |
| 2284 | TCAtcacacccaTG | NT5E\|TNFRSF14 | |
| 2285 | TCATcacacccATG | NT5E\|TNFRSF14 | |
| 2286 | TCATcacaccCATG | NT5E\|TNFRSF14 | |
| 2287 | TTTtaatgtttTTGG | NT5E\|HAVCR2 | |
| 2288 | TTTTaatgttttTGG | NT5E\|HAVCR2 | |
| 2289 | TTTTaatgtttTTGG | NT5E\|HAVCR2 | |
| 2290 | TTCtgagggcttGG | NT5E\|VSIR | |
| 2291 | TTCtgagggctTGG | NT5E\|VSIR | |
| 2292 | TTCTgagggcTTGG | NT5E\|VSIR | |
| 2293 | GGtgtgtgtgggtgtGG | CD86\|VSIR | |
| 2294 | GGTgtgtgtgggtgtGG | CD86\|VSIR | |
| 2295 | GGtgtgtgtgggtgTGG | CD86\|VSIR | |
| 2296 | ATattgggccctGG | CEACAM1\|KIR2DL3 | |
| 2297 | ATATtgggccctGG | CEACAM1\|KIR2DL3 | |
| 2298 | ATAttgggccCTGG | CEACAM1\|KIR2DL3 | |
| 2299 | CAtcacacccatGG | NT5E\|TNFRSF14 | |
| 2300 | CATCacacccatGG | NT5E\|TNFRSF14 | |
| 2301 | CATCacacccATGG | NT5E\|TNFRSF14 | |
| 2302 | TCatcacacccatGG | NT5E\|TNFRSF14 | |
| 2303 | TCatcacacccATGG | NT5E\|TNFRSF14 | |
| 2304 | TCATcacacccaTGG | NT5E\|TNFRSF14 | |
| 2305 | TTaatgttttTGGG | NT5E\|HAVCR2 | |
| 2306 | TTAatgttttTGGG | NT5E\|HAVCR2 | |
| 2307 | TTAAtgttttTGGG | NT5E\|HAVCR2 | |
| 2308 | TTTAatgtttttGGG | NT5E\|HAVCR2 | |
| 2309 | TTTaatgttttTGGG | NT5E\|HAVCR2 | |
| 2310 | TTTAatgttttTGGG | NT5E\|HAVCR2 | |
| 2311 | TTTTaatgtttttGGG | NT5E\|HAVCR2 | |
| 2312 | TTTtaatgttttTGGG | NT5E\|HAVCR2 | |
| 2313 | TTTTaatgttttTGGG | NT5E\|HAVCR2 | |
| 2314 | TGtgtgtccaagGG | NT5E\|TIGIT | |
| 2315 | TGTGtgtccaagGG | NT5E\|TIGIT | |
| 2316 | TGTgtgtccaAGGG | NT5E\|TIGIT | |
| 2317 | CCagctggacgcGG | LAG3\|HMOX1 | |
| 2318 | CCAgctggacgcGG | LAG3\|HMOX1 | |
| 2319 | CCagctggacgCGG | LAG3\|HMOX1 | |
| 2320 | CCacccactcagaGG | NT5E\|CD276 | |
| 2321 | CCacccactcagAGG | NT5E\|CD276 | |
| 2322 | CCAcccactcagaGG | NT5E\|CD276 | |
| 2323 | AGgctgctaccaGG | CD80\|TIGIT | |
| 2324 | AGgctgctaccAGG | CD80\|TIGIT | |
| 2325 | AGGctgctaccAGG | CD80\|TIGIT | |
| 2326 | AGtgcccacatcCG | CEACAM1\|TNFRSF14 | |
| 2327 | AGTgcccacatcCG | CEACAM1\|TNFRSF14 | |
| 2328 | AGtgcccacatCCG | CEACAM1\|TNFRSF14 | |
| 2329 | TTGTgtttggtgAG | CEACAM1\|CD86 | |
| 2330 | TTGtgtttggTGAG | CEACAM1\|CD86 | |
| 2331 | TTGTgtttggTGAG | CEACAM1\|CD86 | |
| 2332 | CTTgtgtttggtgAG | CEACAM1\|CD86 | |
| 2333 | CTtgtgtttggTGAG | CEACAM1\|CD86 | |
| 2334 | CTTGtgtttggTGAG | CEACAM1\|CD86 | |
| 2335 | TCtatttttaattttctGAG | CD80\|CD86 | |
| 2336 | TCtatttttaattttcTGAG | CD80\|CD86 | |
| 2337 | TCTAtttttaattttcTGAG | CD80\|CD86 | |
| 2338 | GTcagcctcactgAG | CEACAM1\|VSIR | |
| 2339 | GTcagcctcactGAG | CEACAM1\|VSIR | |
| 2340 | GTcagcctcacTGAG | CEACAM1\|VSIR | |
| 2341 | AGcaaccagagGAG | NT5E\|CD86 | |
| 2342 | AGcaaccagaGGAG | NT5E\|CD86 | |
| 2343 | AGCaaccagaGGAG | NT5E\|CD86 | |
| 2344 | AGggccagacaggAG | CD276\|VSIR | |
| 2345 | AGggccagacagGAG | CD276\|VSIR | |
| 2346 | AGGgccagacaggAG | CD276\|VSIR | |
| 2347 | CTcaccctgagtcAG | CD86\|VSIR | |
| 2348 | CTcaccctgagtCAG | CD86\|VSIR | |
| 2349 | CTcaccctgagTCAG | CD86\|VSIR | |
| 2350 | TCtcaccctgagtcAG | CD86\|VSIR | |
| 2351 | TCTcaccctgagtcAG | CD86\|VSIR | |
| 2352 | TCTCaccctgagtcAG | CD86\|VSIR | |
| 2353 | GAtgaggaaacagactcAG | CD274\|VSIR | |
| 2354 | GATGaggaaacagactcAG | CD274\|VSIR | |
| 2355 | GATgaggaaacagacTCAG | CD274\|VSIR | |
| 2356 | AGatgaggaaacagactcAG | CD274\|VSIR | |
| 2357 | AGAtgaggaaacagactcAG | CD274\|VSIR | |
| 2358 | AGAtgaggaaacagactCAG | CD274\|VSIR | |
| 2359 | AAGcaaatgtctgCAG | CEACAM1\|PDCD1LG2 | |
| 2360 | AAGcaaatgtctGCAG | CEACAM1\|PDCD1LG2 | |
| 2361 | AAGCaaatgtctGCAG | CEACAM1\|PDCD1LG2 | |
| 2362 | ATAggataatGCAG | CEACAM1\|CD276 | |
| 2363 | ATAGgataatgCAG | CEACAM1\|CD276 | |
| 2364 | ATAGgataatGCAG | CEACAM1\|CD276 | |
| 2365 | GGctggtgttggcAG | VSIR\|PDCD1LG2 | |
| 2366 | GGctggtgttggCAG | VSIR\|PDCD1LG2 | |
| 2367 | GGctggtgttggcAG | VSIR\|PDCD1LG2 | |
| 2368 | TGgctggtgttggcAG | VSIR\|PDCD1LG2 | |
| 2369 | TGGctggtgttggcAG | VSIR\|PDCD1LG2 | |
| 2370 | TGgctggtgttggCAG | VSIR\|PDCD1LG2 | |
| 2371 | GTggctggtgttggcAG | VSIR\|PDCD1LG2 | |
| 2372 | GTGgctggtgttggcAG | VSIR\|PDCD1LG2 | |
| 2373 | GTggctggtgttggcAG | VSIR\|PDCD1LG2 | |
| 2374 | TCtgctacttcccAG | CD80\|VSIR | |
| 2375 | TCTgctacttcccAG | CD80\|VSIR | |
| 2376 | TCTgctacttccCAG | CD80\|VSIR | |
| 2377 | CTctgctacttcccAG | CD80\|VSIR | |
| 2378 | CTCtgctacttcccAG | CD80\|VSIR | |
| 2379 | CTctgctacttccCAG | CD80\|VSIR | |
| 2380 | CCtctgctacttcccAG | CD80\|VSIR | |
| 2381 | CCTctgctacttcccAG | CD80\|VSIR | |
| 2382 | CCtctgctacttccCAG | CD80\|VSIR | |
| 2383 | TCTCcaagcaagaAG | VSIR\|IDO1 | |
| 2384 | TCTccaagcaaGAAG | VSIR\|IDOl | |
| 2385 | TCTCcaagcaaGAAG | VSIR\|IDOl | |
| 2386 | TCTCcaagcaagAAG | VSIR\|IDOl | CRM0285 |
| 2387 | TGCTttccaacaAG | NT5E\|LGALS9 | |
| 2388 | TGCtttccaaCAAG | NT5E\|LGALS9 | |
| 2389 | TGCTttccaaCAAG | NT5E\|LGALS9 | |
| 2390 | ATTctgagggctTTC | KIR2DL3\|TIGIT | |
| 2391 | ATTCtgagggctTTC | KIR2DL3\|TIGIT | |
| 2392 | ATTCtgagggcTTTC | KIR2DL3\|TIGIT | |
| 2393 | GAttctgagggcttTC | KIR2DL3\|TIGIT | |
| 2394 | GATtctgagggctTTC | KIR2DL3\|TIGIT | |
| 2395 | GATTctgagggcTTTC | KIR2DL3\|TIGIT | |
| 2396 | GGattctgagggcttTC | KIR2DL3\|TIGIT | |
| 2397 | GGattctgagggctTTC | KIR2DL3\|TIGIT | |
| 2398 | GGAttctgagggctTTC | KIR2DL3\|TIGIT | |
| 2399 | CCAAaatgcatgTTC | CEACAM1\|VSIR | |
| 2400 | CCAaaatgcatGTTC | CEACAM1\|VSIR | |
| 2401 | CCAAaatgcatGTTC | CEACAM1\|VSIR | |
| 2402 | CAaggccagggtTC | NT5E\|TIGIT | |
| 2403 | CAAggccagggTTC | NT5E\|TIGIT | |
| 2404 | CAAGgccagggTTC | NT5E\|TIGIT | |
| 2405 | CAgagcctcttcctTC | PDCD1\|KIR2DL1\|KIR2DL3 | |
| 2406 | CAgagcctcttccTTC | PDCD1\|KIR2DL1\|KIR2DL3 | |
| 2407 | CAGagcctcttcctTC | PDCD1\|KIR2DL1\|KIR2DL3 | |
| 2408 | GCagagcctcttcctTC | PDCD1\|KIR2DL3 | |
| 2409 | GCagagcctcttccTTC | PDCD1\|KIR2DL3 | |
| 2410 | GCAgagcctcttcctTC | PDCD1\|KIR2DL3 | |
| 2411 | CCAcaggaatATTC | NT5E\|CD80 | |
| 2412 | CCACaggaataTTC | NT5E\|CD80 | |
| 2413 | CCACaggaatATTC | NT5E\|CD80 | |
| 2414 | CAtgctcctatGTC | NT5E\|CD276 | |
| 2415 | CAtgctcctaTGTC | NT5E\|CD276 | |
| 2416 | CATGctcctaTGTC | NT5E\|CD276 | |
| 2417 | CCatgctcctatgTC | NT5E\|CD276 | |
| 2418 | CCAtgctcctatgTC | NT5E\|CD276 | |
| 2419 | CCATgctcctatgTC | NT5E\|CD276 | |
| 2420 | GCcatgctcctatgTC | NT5E\|CD276 | |
| 2421 | GCcatgctcctatGTC | NT5E\|CD276 | |
| 2422 | GCCatgctcctatgTC | NT5E\|CD276 | |
| 2423 | TGccatgctcctatgTC | NT5E\|CD276 | |
| 2424 | TGccatgctcctatGTC | NT5E\|CD276 | |
| 2425 | TGCcatgctcctatgTC | NT5E\|CD276 | |
| 2426 | CTgtgttgtgggTC | HAVCR2\|PDCD1LG2 | |
| 2427 | CTGtgttgtggGTC | HAVCR2\|PDCD1LG2 | |
| 2428 | CTGTgttgtggGTC | HAVCR2\|PDCD1LG2 | |
| 2429 | TGgcctgtgccgTC | VSIR\|LGALS9 | |
| 2430 | TGgcctgtgccGTC | VSIR\|LGALS9 | |
| 2431 | TGGcctgtgccgTC | VSIR\|LGALS9 | |
| 2432 | TCtcaccctgagTC | CD86\|VSIR | |
| 2433 | TCTCaccctgagTC | CD86\|VSIR | |
| 2434 | TCTcaccctgAGTC | CD86\|VSIR | |
| 2435 | CAccagccatgtcTC | CD86\|TIGIT | |
| 2436 | CAccagccatgtCTC | CD86\|TIGIT | |
| 2437 | CAccagccatgTCTC | CD86\|TIGIT | |
| 2438 | CTttcttccttttctcTC | CEACAM1\|NT5E | |
| 2439 | CTTtcttccttttctcTC | CEACAM1\|NT5E | |
| 2440 | CTTTcttccttttctcTC | CEACAM1\|NT5E | |
| 2441 | TCcggttcttgcTC | LAG3\|CD80 | |
| 2442 | TCCggttcttgcTC | LAG3\|CD80 | |
| 2443 | TCCGgttcttgcTC | LAG3\|CD80 | |
| 2444 | TCCAattttatccTC | NT5E\|CD86 | |
| 2445 | TCCAattttatcCTC | NT5E\|CD86 | |
| 2446 | TCCAattttatCCTC | NT5E\|CD86 | |
| 2447 | ATCcaattttatcCTC | NT5E\|CD86 | |
| 2448 | ATCcaattttatCCTC | NT5E\|CD86 | |
| 2449 | ATCCaattttatCCTC | NT5E\|CD86 | |
| 2450 | CCtgagagtgccTC | CEACAM1\|VSIR | |
| 2451 | CCtgagagtgcCTC | CEACAM1\|VSIR | |
| 2452 | CCTgagagtgcCTC | CEACAM1\|VSIR | |
| 2453 | GGcctctaccccTC | NT5E\|VTCN1 | |
| 2454 | GGcctctacccCTC | NT5E\|VTCN1 | |
| 2455 | GGCctctaccccTC | NT5E\|VTCN1 | |
| 2456 | GAtgaggaaacagACTC | CD274\|VSIR | |
| 2457 | GATgaggaaacagACTC | CD274\|VSIR | |
| 2458 | GATGaggaaacagACTC | CD274\|VSIR | |
| 2459 | AGatgaggaaacagaCTC | CD274\|VSIR | |
| 2460 | AGATgaggaaacagacTC | CD274\|VSIR | |
| 2461 | AGATgaggaaacagACTC | CD274\|VSIR | |
| 2462 | GCctcagatctATC | PDCD1LG2\|TIGIT | |
| 2463 | GCctcagatctATC | PDCD1LG2\|TIGIT | |
| 2464 | GCCtcagatcTATC | PDCD1LG2\|TIGIT | |
| 2465 | ACTCactgatgATC | NT5E\|VSIR | |
| 2466 | ACTcactgatGATC | NT5E\|VSIR | |
| 2467 | ACTCactgatGATC | NT5E\|VSIR | |
| 2468 | TACTcatactcATC | CD86\|TDO2 | |
| 2469 | TACtcatactCATC | CD86\|TDO2 | |
| 2470 | TACTcatactCATC | CD86\|TDO2 | |
| 2471 | TTACtcatactcATC | CD86\|TDO2 | |
| 2472 | TTActcatactCATC | CD86\|TDO2 | |
| 2473 | TTACtcatactCATC | CD86\|TDO2 | |
| 2474 | TTecccaggccaTC | NT5E\|CD86 | |
| 2475 | TTCcccaggccaTC | NT5E\|CD86 | |
| 2476 | TTCcccaggccATC | NT5E\|CD86 | |
| 2477 | CCctgctgggccctGC | CD276\|TIGIT | |
| 2478 | CCctgctgggcccTGC | CD276\|TIGIT | |
| 2479 | CCCtgctgggccctGC | CD276\|TIGIT | |
| 2480 | CAGGaaaagacTGC | NT5E\|CD276 | |
| 2481 | CAGgaaaagaCTGC | NT5E\|CD276 | |
| 2482 | CAGGaaaagaCTGC | NT5E\|CD276 | |
| 2483 | ATTattttgtttATGC | NT5E\|VTCN1 | |
| 2484 | ATTAttttgtttaTGC | NT5E\|VTCN1 | |
| 2485 | ATTAttttgtttATGC | NT5E\|VTCN1 | |
| 2486 | CATTattttgtttatGC | NT5E\|VTCN1 | |
| 2487 | CATtattttgtttATGC | NT5E\|VTCN1 | |
| 2488 | CATTattttgtttATGC | NT5E\|VTCN1 | |
| 2489 | ACAttattttgtttatGC | NT5E\|VTCN1 | |
| 2490 | ACAttattttgtttaTGC | NT5E\|VTCN1 | |
| 2491 | ACATtattttgtttATGC | NT5E\|VTCN1 | |
| 2492 | TACattattttgtttatGC | NT5E\|VTCN1 | |
| 2493 | TACattattttgtttaTGC | NT5E\|VTCN1 | |
| 2494 | TACAttattttgtttATGC | NT5E\|VTCN1 | |
| 2495 | CCtgcactagatGC | CEACAM1\|VSIR | |
| 2496 | CCtgcactagaTGC | CEACAM1\|VSIR | |
| 2497 | CCTgcactagaTGC | CEACAM1\|VSIR | |
| 2498 | GTggctggtgttgGC | VSIR\|PDCD1LG2 | |
| 2499 | GTggctggtgttGGC | VSIR\|PDCD1LG2 | |
| 2500 | GTGgctggtgttgGC | VSIR\|PDCD1LG2 | |
| 2501 | CTttgccctcctgGC | NT5E\|LGALS9 | |
| 2502 | CTTtgccctcctgGC | NT5E\|LGALS9 | |
| 2503 | CTttgccctcctGGC | NT5E\|LGALS9 | |
| 2504 | ATcacacccatgGC | NT5E\|TNFRSF14 | |
| 2505 | ATCacacccatGGC | NT5E\|TNFRSF14 | |
| 2506 | ATCAcacccatGGC | NT5E\|TNFRSF14 | |
| 2507 | CAtcacacccatgGC | NT5E\|TNFRSF14 | |
| 2508 | CATcacacccatgGC | NT5E\|TNFRSF14 | |
| 2509 | CAtcacacccatGGC | NT5E\|TNFRSF14 | |
| 2510 | TCatcacacccatgGC | NT5E\|TNFRSF14 | |
| 2511 | TCatcacacccatGGC | NT5E\|TNFRSF14 | |
| 2512 | TCAtcacacccatgGC | NT5E\|TNFRSF14 | |
| 2513 | ATGgttgaaatGGC | VSIR\|PDCD1LG2 | |
| 2514 | ATGGttgaaatGGC | VSIR\|PDCD1LG2 | |
| 2515 | ATGGttgaaaTGGC | VSIR\|PDCD1LG2 | |
| 2516 | TGGattaagggAGC | HAVCR2\|TIGIT | |
| 2517 | TGGAttaagggAGC | HAVCR2\|TIGIT | |
| 2518 | TGGAttaaggGAGC | HAVCR2\|TIGIT | |
| 2519 | CTggattaagggaGC | HAVCR2\|TIGIT | |
| 2520 | CTGGattaagggaGC | HAVCR2\|TIGIT | |
| 2521 | CTGgattaaggGAGC | HAVCR2\|TIGIT | |
| 2522 | TTgcctgtgaggaGC | PDCD1LG2\|TDO2 | |
| 2523 | TTgcctgtgaggAGC | PDCD1LG2\|TDO2 | |
| 2524 | TTGcctgtgaggAGC | PDCD1LG2\|TDO2 | |
| 2525 | GGgtagagaaggaGC | LAG3\|HAVCR2 | |
| 2526 | GGgtagagaaggAGC | LAG3\|HAVCR2 | |
| 2527 | GGgtagagaagGAGC | LAG3\|HAVCR2 | |
| 2528 | GGagaggagaagAGC | CD276\|TDO2 | |
| 2529 | GGagaggagaaGAGC | CD276\|TDO2 | |
| 2530 | GGAgaggagaaGAGC | CD276\|TDO2 | |
| 2531 | TAGgataatgcAGC | CEACAM1\|CD276 | |
| 2532 | TAGGataatgcAGC | CEACAM1\|CD276 | |
| 2533 | TAGGataatgCAGC | CEACAM1\|CD276 | |
| 2534 | ATAggataatgcAGC | CEACAM1\|CD276 | |
| 2535 | ATAGgataatgcAGC | CEACAM1\|CD276 | |
| 2536 | ATAGgataatgCAGC | CEACAM1\|CD276 | |
| 2537 | CTgctacttcccaGC | CD80\|VSIR | |
| 2538 | CTgctacttcccAGC | CD80\|VSIR | |
| 2539 | CTGctacttcccaGC | CD80\|VSIR | |
| 2540 | TCtgctacttcccaGC | CD80\|VSIR | |
| 2541 | TCtgctacttcccAGC | CD80\|VSIR | |
| 2542 | TCTgctacttcccaGC | CD80\|VSIR | |
| 2543 | CTctgctacttcccaGC | CD80\|VSIR | |
| 2544 | CTctgctacttcccAGC | CD80\|VSIR | |
| 2545 | CTCtgctacttcccaGC | CD80\|VSIR | |
| 2546 | CCtctgctacttcccaGC | CD80\|VSIR | |
| 2547 | CCtctgctacttcccAGC | CD80\|VSIR | |
| 2548 | CCTctgctacttcccaGC | CD80\|VSIR | |
| 2549 | TCccacgccaaaGC | NT5E\|PDCD1 | |
| 2550 | TCccacgccaaAGC | NT5E\|PDCD1 | |
| 2551 | TCCcacgccaaaGC | NT5E\|PDCD1 | |
| 2552 | TTgaccccaggtCC | HMOX1\|VSIR | |
| 2553 | TTGaccccaggtCC | HMOX1\|VSIR | |
| 2554 | TTgaccccaggTCC | HMOX1\|VSIR | |
| 2555 | CActaccattctCC | CD276\|VSIR | |
| 2556 | CACtaccattcTCC | CD276\|VSIR | |
| 2557 | CACtaccattCTCC | CD276\|VSIR | |
| 2558 | AAaaacatttaCTCC | CD276\|TDO2 | |
| 2559 | AAAaacatttaCTCC | CD276\|TDO2 | |
| 2560 | AAAAacatttaCTCC | CD276\|TDO2 | CRM0286 |
| 2561 | GAGtaagagacTCC | CD80\|KIR2DL1 | |
| 2562 | GAGtaagagaCTCC | CD80\|KIR2DL1 | |
| 2563 | GAGTaagagaCTCC | CD80\|KIR2DL1 | |
| 2564 | ATCCaattttatCC | NT5E\|CD86 | |
| 2565 | ATCCaattttaTCC | NT5E\|CD86 | |
| 2566 | ATCCaattttATCC | NT5E\|CD86 | |
| 2567 | CTtccccagggatCC | CEACAM1\|LAG3 | |
| 2568 | CTTccccagggatCC | CEACAM1\|LAG3 | |
| 2569 | CTtccccagggaTCC | CEACAM1\|LAG3 | |
| 2570 | CAggaaaagactGCC | NT5E\|CD276 | |
| 2571 | CAggaaaagacTGCC | NT5E\|CD276 | |
| 2572 | CAGgaaaagacTGCC | NT5E\|CD276 | |
| 2573 | CCcattttcatgCC | CD276\|VSIR | |
| 2574 | CCcattttcatGCC | CD276\|VSIR | |
| 2575 | CCCattttcatgCC | CD276\|VSIR | |
| 2576 | GCccattttcatgCC | CD276\|VSIR | |
| 2577 | GCccattttcatGCC | CD276\|VSIR | |
| 2578 | GCCcattttcatgCC | CD276\|VSIR | |
| 2579 | CCtctgctacttcCC | CD80\|VSIR | |
| 2580 | CCTctgctacttcCC | CD80\|VSIR | |
| 2581 | CCtctgctacttCCC | CD80\|VSIR | |
| 2582 | TCcctccgagtcCC | CD276\|VSIR | |
| 2583 | TCCctccgagtcCC | CD276\|VSIR | |
| 2584 | TCcctccgagtCCC | CD276\|VSIR | |
| 2585 | GAccccagctcctcCC | TNFRSF14\|VSIR | |
| 2586 | GACcccagctcctcCC | TNFRSF14\|VSIR | |
| 2587 | GAccccagctcctCCC | TNFRSF14\|VSIR | |
| 2588 | GGAaaagactgcCC | NT5E\|CD276 | |
| 2589 | GGAaaagactgCCC | NT5E\|CD276 | |
| 2590 | GGAaaagactGCCC | NT5E\|CD276 | |
| 2591 | AGgaaaagactgcCC | NT5E\|CD276 | |
| 2592 | AGgaaaagactgCCC | NT5E\|CD276 | |
| 2593 | AGgaaaagactGCCC | NT5E\|CD276 | |
| 2594 | CAggaaaagactgcCC | NT5E\|CD276 | |
| 2595 | CAGgaaaagactgcCC | NT5E\|CD276 | |
| 2596 | CAGGaaaagactgcCC | NT5E\|CD276 | |
| 2597 | GTggtcctgggccCC | NT5E\|CD276 | |
| 2598 | GTGgtcctgggccCC | NT5E\|CD276 | |
| 2599 | GTggtcctgggcCCC | NT5E\|CD276 | |
| 2600 | AGTtatgtaaccCC | VTCN1\|VSIR | |
| 2601 | AGTtatgtaacCCC | VTCN1\|VSIR | |
| 2602 | AGTtatgtaaCCCC | VTCN1\|VSIR | |
| 2603 | CAgttatgtaaccCC | VTCN1\|VSIR | |
| 2604 | CAgttatgtaacCCC | VTCN1\|VSIR | |
| 2605 | CAgttatgtaaCCCC | VTCN1\|VSIR | |
| 2606 | CAgttatgtaaCCC | VTCN1\|VSIR | |
| 2607 | CAGttatgtaACCC | VTCN1\|VSIR | |
| 2608 | CAGTtatgtaACCC | VTCN1\|VSIR | |
| 2609 | TAAAaagaggaaCCC | CEACAM1\|CD80 | |
| 2610 | TAAaaagaggaACCC | CEACAM1\|CD80 | |
| 2611 | TAAAaagaggaACCC | CEACAM1\|CD80 | |
| 2612 | CTGAtattcttACC | CEACAM1\|CD274 | |
| 2613 | CTGatattctTACC | CEACAM1\|CD274 | |
| 2614 | CTGAtattctTACC | CEACAM1\|CD274 | |
| 2615 | CCtgggtgtgcacc | HMOX1\|NT5E | |
| 2616 | CCtgggtgtgcACC | HMOX1\|NT5E | |
| 2617 | cCTgggtgtgcacc | HMOX1\|NT5E | |
| 2618 | TAGgctgtgaaaCC | TIGIT\|TDO2 | |
| 2619 | TAGgctgtgaAACC | TIGIT\|TDO2 | |
| 2620 | TAGGctgtgaAACC | TIGIT\|TDO2 | |
| 2621 | TAAttttccttGTAC | NT5E\|CD80 | |
| 2622 | TAATtttccttgTAC | NT5E\|CD80 | |
| 2623 | TAATtttccttGTAC | NT5E\|CD80 | |
| 2624 | CTAattttccttgTAC | NT5E\|CD80 | |
| 2625 | CTAAttttccttgTAC | NT5E\|CD80 | |
| 2626 | CTAAttttccttGTAC | NT5E\|CD80 | |
| 2627 | TCCAtaacttcTAC | CD86\|TDO2 | |
| 2628 | TCCataacttCTAC | CD86\|TDO2 | |
| 2629 | TCCAtaacttCTAC | CD86\|TDO2 | |
| 2630 | TATttttctgccTAC | CD86\|TDO2 | |
| 2631 | TATttttctgcCTAC | CD86\|TDO2 | |
| 2632 | TATTtttctgcCTAC | CD86\|TDO2 | |
| 2633 | TTATttttctgcctAC | CD86\|TDO2 | |
| 2634 | TTATttttctgccTAC | CD86\|TDO2 | |
| 2635 | TTATttttctgcCTAC | CD86\|TDO2 | |
| 2636 | GTGtttgttttATAC | LAG3\|PDCD1LG2 | |
| 2637 | GTGTttgttttaTAC | LAG3\|PDCD1LG2 | |
| 2638 | GTGTttgttttATAC | LAG3\|PDCD1LG2 | |
| 2639 | AGccatagccaTAC | VTCN1\|TIGIT | |
| 2640 | AGCcatagccaTAC | VTCN1\|TIGIT | |
| 2641 | AGCCatagccaTAC | VTCN1\|TIGIT | |
| 2642 | TTcctggtaggGAC | CD276\|KIR2DL1 | |
| 2643 | TTCCtggtagggAC | CD276\|KIR2DL1 | |
| 2644 | TTCCtggtaggGAC | CD276\|KIR2DL1 | |
| 2645 | GTtcctggtagggAC | CD276\|KIR2DL1 | |
| 2646 | GTtcctggtaggGAC | CD276\|KIR2DL1 | |
| 2647 | GTTCctggtaggGAC | CD276\|KIR2DL1 | |
| 2648 | ATGcctctgaggAC | NT5E\|PDCD1LG2 | |
| 2649 | ATGcctctgagGAC | NT5E\|PDCD1LG2 | |
| 2650 | ATGCctctgagGAC | NT5E\|PDCD1LG2 | |
| 2651 | GCtgctaccaggAC | CD80\|TIGIT | |
| 2652 | GCtgctaccagGAC | CD80\|TIGIT | |
| 2653 | GCtgctaccaGGAC | CD80\|TIGIT | |
| 2654 | GGctgctaccaggAC | CD80\|TIGIT | |
| 2655 | GGctgctaccagGAC | CD80\|TIGIT | |
| 2656 | GGCtgctaccaggAC | CD80\|TIGIT | |
| 2657 | AGgctgctaccaggAC | CD80\|TIGIT | |
| 2658 | AGGctgctaccaggAC | CD80\|TIGIT | |
| 2659 | AGgctgctaccagGAC | CD80\|TIGIT | |
| 2660 | TCctacaggtAGAC | CEACAM1\|VTCN1 | |
| 2661 | TCctacaggtAGAC | CEACAMI\|VTCN1 | |
| 2662 | TCCTacaggtAGAC | CEACAM1\|VTCN1 | |
| 2663 | ATcctacaggtAGAC | CEACAM1\|VTCN1 | |
| 2664 | ATCctacaggtAGAC | CEACAM1\|VTCN1 | |
| 2665 | ATCCtacaggtAGAC | CEACAM1\|VTCN1 | |
| 2666 | GCTGcaaagtagAC | CEACAM1\|LAG3 | |
| 2667 | GCTgcaaagtAGAC | CEACAM1\|LAG3 | |
| 2668 | GCTGcaaagtAGAC | CEACAM1\|LAG3 | |
| 2669 | TTACaaccataGAC | CD86\|TDO2 | |
| 2670 | TTAcaaccatAGAC | CD86\|TDO2 | |
| 2671 | TTACaaccatAGAC | CD86\|TDO2 | |
| 2672 | TGttgcaacagAGAC | CD80\|TIGIT | |
| 2673 | TGTTgcaacagaGAC | CD80\|TIGIT | |
| 2674 | TGTTgcaacagAGAC | CD80\|TIGIT | |
| 2675 | TTGTtgcaacagagAC | CD80\|TIGIT | |
| 2676 | TTGttgcaacagAGAC | CD80\|TIGIT | |
| 2677 | TTGTtgcaacagAGAC | CD80\|TIGIT | |
| 2678 | TTCtggttctatCAC | NT5E\|TDO2 | |
| 2679 | TTCtggttctaTCAC | NT5E\|TDO2 | |
| 2680 | TTCTggttctaTCAC | NT5E\|TDO2 | |
| 2681 | AAattcatggGCAC | PDCD1LG2\|TDO2 | |
| 2682 | AAAttcatggGCAC | PDCD1LG2\|TDO2 | |
| 2683 | AAATtcatggGCAC | PDCD1LG2\|TDO2 | |
| 2684 | AGcaggccgcccAC | LAG3\|PDCD1 | |
| 2685 | AGcaggccgccCAC | LAG3\|PDCD1 | |
| 2686 | AGCaggccgcccAC | LAG3\|PDCD1 | |
| 2687 | CAgcaggccgcccAC | LAG3\|PDCD1 | |
| 2688 | CAGcaggccgcccAC | LAG3\|PDCD1 | |
| 2689 | CAgcaggccgccCAC | LAG3\|PDCD1 | |
| 2690 | CCagcaggccgcccAC | LAG3\|PDCD1 | |
| 2691 | CCAgcaggccgcccAC | LAG3\|PDCD1 | |
| 2692 | CCagcaggccgccCAC | LAG3\|PDCD1 | |
| 2693 | TTAtgtaacccCAC | VTCN1\|VSIR | |
| 2694 | TTATgtaacccCAC | VTCN1\|VSIR | |
| 2695 | TTATgtaaccCCAC | VTCN1\|VSIR | |
| 2696 | GTTatgtaaccccAC | VTCN1\|VSIR | |
| 2697 | GTTatgtaacccCAC | VTCN1\|VSIR | |
| 2698 | GTTatgtaaccCCAC | VTCN1\|VSIR | |
| 2699 | AGttatgtaaccccAC | VTCN1\|VSIR | |
| 2700 | AGTTatgtaaccccAC | VTCN1\|VSIR | |
| 2701 | AGTTatgtaacccCAC | VTCN1\|VSIR | |
| 2702 | CAgttatgtaaccccAC | VTCN1\|VSIR | |
| 2703 | CAGttatgtaaccccAC | VTCN1\|VSIR | |
| 2704 | CAGttatgtaacccCAC | VTCN1\|VSIR | |
| 2705 | AACaataccagACAC | NT5E\|CD274 | |
| 2706 | AACAataccagaCAC | NT5E\|CD274 | |
| 2707 | AACAataccagACAC | NT5E\|CD274 | |
| 2708 | TGAAcagacagaCAC | NT5E\|VSIR | |
| 2709 | TGAacagacagACAC | NT5E\|VSIR | |
| 2710 | TGAAcagacagACAC | NT5E\|VSIR | |
| 2711 | AGATaggetgtAAC | NT5E\|CD276 | |
| 2712 | AGAtaggctgTAAC | NT5E\|CD276 | |
| 2713 | AGATaggctgTAAC | NT5E\|CD276 | |
| 2714 | GAGAtaggetgtaAC | NT5E\|CD276 | |
| 2715 | GAGataggetgTAAC | NT5E\|CD276 | |
| 2716 | GAGAtaggctgTAAC | NT5E\|CD276 | |
| 2717 | AGCTgaaattagAAC | HAVCR2\|VTCNl | |
| 2718 | AGCtgaaattaGAAC | HAVCR2\|VTCNl | |
| 2719 | AGCTgaaattaGAAC | HAVCR2\|VTCNl | |
| 2720 | GTTTgatgaccAAC | HAVCR2\|PDCD1LG2 | |
| 2721 | GTTtgatgacCAAC | HAVCR2\|PDCD1LG2 | |
| 2722 | GTTTgatgacCAAC | HAVCR2\|PDCD1LG2 | |
| 2723 | CCctggcttgaAAC | VSIR\|LGALS9 | |
| 2724 | CCCtggcttgaAAC | VSIR\|LGALS9 | |
| 2725 | CCCTggcttgAAAC | VSIR\|LGALS9 | |
| 2726 | GTCaccttgattTTA | HAVCR2\|KIR2DL1\|KIR2DL3 | |
| 2727 | GTCaccttgatTTTA | HAVCR2\|KIR2DL1\|KIR2DL3 | |
| 2728 | GTCAccttgatTTTA | HAVCR2\|KIR2DL1\|KIR2DL3 | |
| 2729 | TGTcaccttgatttTA | HAVCR2\|KIR2DL1\|KIR2DL3 | |
| 2730 | TGTCaccttgatttTA | HAVCR2\|KIR2DL1\|KIR2DL3 | |
| 2731 | TGTCaccttgatTTTA | HAVCR2\|KIR2DL1\|KIR2DL3 | |
| 2732 | CTgtcaccttgatttTA | HAVCR2\|KIR2DL1\|KIR2DL3 | |
| 2733 | CTGtcaccttgattTTA | HAVCR2\|KIR2DL1\|KIR2DL3 | |
| 2734 | CTGTcaccttgatTTTA | HAVCR2\|KIR2DL1\|KIR2DL3 | |
| 2735 | GCtgtcaccttgatttTA | HAVCR2\|KIR2DL1\|KIR2DL3 | |
| 2736 | GCtgtcaccttgattTTA | HAVCR2\|KIR2DL1\|KIR2DL3 | |
| 2737 | GCtgtcaccttgatTTTA | HAVCR2\|KIR2DL1\|KIR2DL3 | |
| 2738 | TACattattttgTTTA | NT5E\|VTCNl | |
| 2739 | TACAttattttgtTTA | NT5E\|VTCNl | |
| 2740 | TACAttattttgTTTA | NT5E\|VTCN1 | |
| 2741 | GAGgagaggaTTTA | NT5E\|PDCD1LG2 | |
| 2742 | GAGGagaggatTTA | NT5E\|PDCD1LG2 | |
| 2743 | GAGGagaggaTTTA | NT5E\|PDCD1LG2 | |
| 2744 | AACAcagggaagTTA | VTCN1\|VSIR | |
| 2745 | AACacagggaaGTTA | VTCN1\|VSIR | |
| 2746 | AACAcagggaaGTTA | VTCN1\|VSIR | |
| 2747 | AGAGttgttttctTA | NT5E\|PDCD1LG2 | |
| 2748 | AGAgttgttttCTTA | NT5E\|PDCD1LG2 | |
| 2749 | AGAGttgttttCTTA | NT5E\|PDCD1LG2 | |
| 2750 | CAGagttgttttcTTA | NT5E\|PDCD1LG2 | |
| 2751 | CAGagttgttttCTTA | NT5E\|PDCD1LG2 | |
| 2752 | CAGAgttgttttcTTA | NT5E\|PDCD1LG2 | |
| 2753 | CTAAttttccttGTA | NT5E\|CD80 | |
| 2754 | CTAattttcctTGTA | NT5E\|CD80 | |
| 2755 | CTAAttttcctTGTA | NT5E\|CD80 | |
| 2756 | ACTAtgaatggGTA | NT5E\|CD86 | |
| 2757 | ACTatgaatgGGTA | NT5E\|CD86 | |
| 2758 | ACTAtgaatgGGTA | NT5E\|CD86 | |
| 2759 | GGgagatttctCTA | NT5E\|CD86 | |
| 2760 | GGGagatttcTCTA | NT5E\|CD86 | |
| 2761 | GGGAgatttcTCTA | NT5E\|CD86 | |
| 2762 | AAGcagcttaGATA | VTCN1\|VSIR | |
| 2763 | AAGCagcttagATA | VTCN1\|VSIR | |
| 2764 | AAGCagcttaGATA | VTCN1\|VSIR | |
| 2765 | GGACagatgaagATA | VTCN1\|TIGIT | |
| 2766 | GGAcagatgaaGATA | VTCN1\|TIGIT | |
| 2767 | GGACagatgaaGATA | VTCN1\|TIGIT | |
| 2768 | ACCcacttagAATA | TIGIT\|TDO2 | |
| 2769 | ACCCacttagaATA | TIGIT\|TDO2 | |
| 2770 | ACCCacttagAATA | TIGIT\|TDO2 | |
| 2771 | CTTGtgtttggtGA | CEACAM1\|CD86 | |
| 2772 | CTTGtgtttggTGA | CEACAM1\|CD86 | |
| 2773 | CTTGtgtttgGTGA | CEACAM1\|CD86 | |
| 2774 | TCTgtagctggtGA | VSIR\|PDCD1LG2 | |
| 2775 | TCtgtagctgGTGA | VSIR\|PDCD1LG2 | |
| 2776 | TCTGtagctgGTGA | VSIR\|PDCD1LG2 | |
| 2777 | TCtatttttaattttcTGA | CD80\|CD86 | |
| 2778 | TCtatttttaattttCTGA | CD80\|CD86 | |
| 2779 | TCTAtttttaattttCTGA | CD80\|CD86 | |
| 2780 | TAgggtcaatCTGA | NT5E\|VTCN1 | |
| 2781 | TAGggtcaatCTGA | NT5E\|VTCN1 | |
| 2782 | TAGGgtcaatCTGA | NT5E\|VTCN1 | |
| 2783 | TGtgtgtgggtgtgGA | CD86\|VSIR | |
| 2784 | TGtgtgtgggtgtGGA | CD86\|VSIR | |
| 2785 | TGTgtgtgggtgtgGA | CD86\|VSIR | |
| 2786 | GTgtgtgtgggtgtgGA | CD86\|VSIR | |
| 2787 | GTGtgtgtgggtgtgGA | CD86\|VSIR | |
| 2788 | GTgtgtgtgggtgtGGA | CD86\|VSIR | |
| 2789 | GGtgtgtgtgggtgtgGA | CD86\|VSIR | |
| 2790 | GGtgtgtgtgggtgtGGA | CD86\|VSIR | |
| 2791 | GGTgtgtgtgggtgtgGA | CD86\|VSIR | |
| 2792 | GTtcctggtaggGA | CD276\|KIR2DL1 | |
| 2793 | GTtcctggtagGGA | CD276\|KIR2DL1 | |
| 2794 | GTTCctggtagGGA | CD276\|KIR2DL1 | |
| 2795 | AGggcagggtcagGA | CD276\|VSIR | |
| 2796 | AGggcagggtcaGGA | CD276\|VSIR | |
| 2797 | AGGgcagggtcagGA | CD276\|VSIR | |
| 2798 | GGctgctaccagGA | CD80\|TIGIT | |
| 2799 | GGctgctaccaGGA | CD80\|TIGIT | |
| 2800 | GGCtgctaccagGA | CD80\|TIGIT | |
| 2801 | AGgctgctaccagGA | CD80\|TIGIT | |
| 2802 | AGGctgctaccagGA | CD80\|TIGIT | |
| 2803 | AGgctgctaccaGGA | CD80\|TIGIT | |
| 2804 | TAgaagagaccaGGA | HAVCR2\|TDO2 | |
| 2805 | TAGaagagaccAGGA | HAVCR2\|TDO2 | |
| 2806 | TAGAagagaccAGGA | HAVCR2\|TDO2 | |
| 2807 | TGgaggtgatTAGA | NT5E\|VTCN1 | |
| 2808 | TGGAggtgattAGA | NT5E\|VTCN1 | |
| 2809 | TGGAggtgatTAGA | NT5E\|VTCN1 | |
| 2810 | ATCctacaggtAGA | CEACAM1\|VTCN1 | |
| 2811 | ATCctacaggTAGA | CEACAM1\|VTCN1 | |
| 2812 | ATCCtacaggTAGA | CEACAM1\|VTCN1 | |
| 2813 | CAtccaacttGAGA | NT5E\|CD80 | |
| 2814 | CATCcaacttgAGA | NT5E\|CD80 | |
| 2815 | CATCcaacttGAGA | NT5E\|CD80 | |
| 2816 | GGactgaagtGAGA | VTCN1\|TIGIT | |
| 2817 | GGActgaagtGAGA | VTCN1\|TIGIT | |
| 2818 | GGACtgaagtGAGA | VTCN1\|TIGIT | |
| 2819 | GCGactgatggaGA | KIR2DL1\|PDCD1LG2 | |
| 2820 | GCGActgatggaGA | KIR2DL1\|PDCD1LG2 | |
| 2821 | GCGactgatgGAGA | KIR2DL1\|PDCD1LG2 | |
| 2822 | GGgccagacaggaGA | CD276\|VSIR | |
| 2823 | GGGccagacaggaGA | CD276\|VSIR | |
| 2824 | GGgccagacaggAGA | CD276\|VSIR | |
| 2825 | AGggccagacaggaGA | CD276\|VSIR | |
| 2826 | AGggccagacaggAGA | CD276\|VSIR | |
| 2827 | AGGgccagacaggaGA | CD276\|VSIR | |
| 2828 | CTAAagaatagaAGA | VTCN1\|TDO2 | |
| 2829 | CTAaagaatagAAGA | VTCN1\|TDO2 | |
| 2830 | CTAAagaatagAAGA | VTCN1\|TDO2 | |
| 2831 | TAGtttctgaaaAAGA | HAVCR2\|IDO1 | |
| 2832 | TAGTttctgaaaaAGA | HAVCR2\|IDO1 | |
| 2833 | TAGTttctgaaaAAGA | HAVCR2\|IDO1 | |
| 2834 | TGtctgtgtgcttCA | NT5E\|LGALS9 | |
| 2835 | TGtctgtgtgcTTCA | NT5E\|LGALS9 | |
| 2836 | TGTCtgtgtgctTCA | NT5E\|LGALS9 | |
| 2837 | CCAcaggaatattCA | NT5E\|CD80 | |
| 2838 | CCACaggaatattCA | NT5E\|CD80 | |
| 2839 | CCACaggaataTTCA | NT5E\|CD80 | |
| 2840 | TGgagcaggcattCA | CEACAM1\|CD276 | |
| 2841 | TGgagcaggcaTTCA | CEACAM1\|CD276 | |
| 2842 | TGGAgcaggcattCA | CEACAM1\|CD276 | |
| 2843 | TCtcaccctgagtCA | CD86\|VSIR | |
| 2844 | TCtcaccctgagTCA | CD86\|VSIR | |
| 2845 | TCtcaccctgaGTCA | CD86\|VSIR | |
| 2846 | GAtgaggaaacagactCA | CD274\|VSIR | |
| 2847 | GAtgaggaaacagaCTCA | CD274\|VSIR | |
| 2848 | GATGaggaaacagaCTCA | CD274\|VSIR | |
| 2849 | AGatgaggaaacagactCA | CD274\|VSIR | |
| 2850 | AGatgaggaaacagaCTCA | CD274\|VSIR | |
| 2851 | AGATgaggaaacagacTCA | CD274\|VSIR | |
| 2852 | AAGcaaatgtctGCA | CEACAM1\|PDCD1LG2 | |
| 2853 | AAGcaaatgtcTGCA | CEACAM1\|PDCD1LG2 | |
| 2854 | AAGCaaatgtcTGCA | CEACAM1\|PDCD1LG2 | |
| 2855 | GGctggtgttggCA | VSIR\|PDCD1LG2 | |
| 2856 | GGctggtgttgGCA | VSIR\|PDCD1LG2 | |
| 2857 | GGCtggtgttggCA | VSIR\|PDCD1LG2 | |
| 2858 | TGgctggtgttggCA | VSIR\|PDCD1LG2 | |
| 2859 | TGGctggtgttggCA | VSIR\|PDCD1LG2 | |
| 2860 | TGgctggtgttgGCA | VSIR\|PDCD1LG2 | |
| 2861 | GTggctggtgttggCA | VSIR\|PDCD1LG2 | |
| 2862 | GTGgctggtgttggCA | VSIR\|PDCD1LG2 | |
| 2863 | GTggctggtgttgGCA | VSIR\|PDCD1LG2 | |
| 2864 | TAGgataatgcagCA | CEACAM1\|CD276 | |
| 2865 | TAGgataatgcaGCA | CEACAM1\|CD276 | |
| 2866 | TAGGataatgcAGCA | CEACAM1\|CD276 | |
| 2867 | ATAggataatgcagCA | CEACAM1\|CD276 | |
| 2868 | ATAggataatgcaGCA | CEACAM1\|CD276 | |
| 2869 | ATAGgataatgcAGCA | CEACAM1\|CD276 | |
| 2870 | AAtgtgggcccagCA | KIR2DL1\|LGALS9 | |
| 2871 | AATgtgggcccagCA | KIR2DL1\|LGALS9 | |
| 2872 | AAtgtgggcccaGCA | KIR2DL1\|LGALS9 | |
| 2873 | CTgaggctcagtcCA | NT5E\|VSIR | |
| 2874 | CTGaggctcagtcCA | NT5E\|VSIR | |
| 2875 | CTgaggctcagtCCA | NT5E\|VSIR | |
| 2876 | CCcattttcatgcCA | CD276\|VSIR | |
| 2877 | CCCattttcatgcCA | CD276\|VSIR | |
| 2878 | CCcattttcatgCCA | CD276\|VSIR | |
| 2879 | GCccattttcatgcCA | CD276\|VSIR | |
| 2880 | GCCcattttcatgcCA | CD276\|VSIR | |
| 2881 | GCccattttcatgCCA | CD276\|VSIR | |
| 2882 | CTctgctacttccCA | CD80\|VSIR | |
| 2883 | CTCtgctacttccCA | CD80\|VSIR | |
| 2884 | CTctgctacttcCCA | CD80\|VSIR | |
| 2885 | CCtctgctacttccCA | CD80\|VSIR | |
| 2886 | CCTctgctacttccCA | CD80\|VSIR | |
| 2887 | CCtctgctacttcCCA | CD80\|VSIR | |
| 2888 | CAgcaggccgccCA | LAG3\|PDCD1 | |
| 2889 | CAGcaggccgccCA | LAG3\|PDCD1 | |
| 2890 | CAgcaggccgcCCA | LAG3\|PDCD1 | |
| 2891 | CCagcaggccgccCA | LAG3\|PDCD1 | |
| 2892 | CCAgcaggccgccCA | LAG3\|PDCD1 | |
| 2893 | CCagcaggccgcCCA | LAG3\|PDCD1 | |
| 2894 | GTTatgtaacccCA | VTCN1\|VSIR | |
| 2895 | GTTatgtaaccCCA | VTCN1\|VSIR | |
| 2896 | GTTatgtaacCCCA | VTCN1\|VSIR | |
| 2897 | AGttatgtaacccCA | VTCN1\|VSIR | |
| 2898 | AGTTatgtaacccCA | VTCN1\|VSIR | |
| 2899 | AGTTatgtaaccCCA | VTCN1\|VSIR | |
| 2900 | CAgttatgtaacccCA | VTCN1\|VSIR | |
| 2901 | CAGttatgtaacccCA | VTCN1\|VSIR | |
| 2902 | CAGTtatgtaacccCA | VTCN1\|VSIR | |
| 2903 | TAttcccaccaccCA | VTCN1\|TDO2 | CRMO287 |
| 2904 | TATtcccaccaccCA | VTCN1\|TDO2 | |
| 2905 | TATTcccaccaccCA | VTCN1\|TDO2 | |
| 2906 | AAaaagaggaaCCCA | CEACAM1\|CD80 | |
| 2907 | AAAaagaggaaCCCA | CEACAM1\|CD80 | |
| 2908 | AAAAagaggaaCCCA | CEACAM1\|CD80 | |
| 2909 | TAaaaagaggaaCCCA | CEACAM1\|CD80 | |
| 2910 | TAAaaagaggaaCCCA | CEACAM1\|CD80 | |
| 2911 | TAAAaagaggaaCCCA | CEACAM1\|CD80 | |
| 2912 | AAttttccttgTACA | NT5E\|CD80 | |
| 2913 | AATtttccttgTACA | NT5E\|CD80 | |
| 2914 | AATTttccttgTACA | NT5E\|CD80 | |
| 2915 | TAattttccttgTACA | NT5E\|CD80 | |
| 2916 | TAAttttccttgTACA | NT5E\|CD80 | |
| 2917 | TAATtttccttgTACA | NT5E\|CD80 | |
| 2918 | CTaattttccttgtACA | NT5E\|CD80 | |
| 2919 | CTaattttccttgTACA | NT5E\|CD80 | |
| 2920 | CTAAttttccttgTACA | NT5E\|CD80 | |
| 2921 | ATTtttctgcctACA | CD86\|TDO2 | |
| 2922 | ATttttctgccTACA | CD86\|TDO2 | |
| 2923 | ATTTttctgccTACA | CD86\|TDO2 | |
| 2924 | TAtttttctgcctACA | CD86\|TDO2 | |
| 2925 | TAtttttctgccTACA | CD86\|TDO2 | |
| 2926 | TATTtttctgccTACA | CD86\|TDO2 | |
| 2927 | TTatttttctgcctaCA | CD86\|TDO2 | |
| 2928 | TTATttttctgcctaCA | CD86\|TDO2 | |
| 2929 | TTATttttctgccTACA | CD86\|TDO2 | |
| 2930 | GCcatagccataCA | VTCN1\|TIGIT | |
| 2931 | GCCatagccataCA | VTCN1\|TIGIT | |
| 2932 | GCCAtagccatACA | VTCN1\|TIGIT | |
| 2933 | AGccatagccataCA | VTCN1\|TIGIT | |
| 2934 | AGccatagccatACA | VTCN1\|TIGIT | |
| 2935 | AGCcatagccatACA | VTCN1\|TIGIT | |
| 2936 | TGAAcagacagacaCA | NT5E\|VSIR | |
| 2937 | TGAacagacagaCACA | NT5E\|VSIR | |
| 2938 | TGAAcagacagaCACA | NT5E\|VSIR | |
| 2939 | GAGataggctGTAA | NT5E\|CD276 | |
| 2940 | GAGAtaggetgTAA | NT5E\|CD276 | |
| 2941 | GAGAtaggctGTAA | NT5E\|CD276 | |
| 2942 | GGagagaggtgagGAA | PDCD1\|KIR2DL1\|KIR2DL3 | |
| 2943 | GGagagaggtgaGGAA | PDCD1\|KIR2DL1\|KIR2DL3 | |
| 2944 | GGAgagaggtgaGGAA | PDCD1\|KIR2DL1\|KIR2DL3 | |
| 2945 | ATTtttaattttctgagGAA | CD80\|CD86 | |
| 2946 | ATttttaattttctgaGGAA | CD80\|CD86 | |
| 2947 | ATTTttaattttctgaGGAA | CD80\|CD86 | |
| 2948 | GGACtgaagtgaGAA | VTCN1\|TIGIT | |
| 2949 | GGActgaagtgAGAA | VTCN1\|TIGIT | |
| 2950 | GGActgaagtgAGAA | VTCN1\|TIGIT | |
| 2951 | CTAAagaatagaaGAA | VTCN1\|TDO2 | |
| 2952 | CTAaagaatagaAGAA | VTCN1\|TDO2 | |
| 2953 | CTAAagaatagaAGAA | VTCN1\|TDO2 | |
| 2954 | TGgcacccttgcAA | VSIR\|PDCD1LG2 | |
| 2955 | TGgcacccttgCAA | VSIR\|PDCD1LG2 | |
| 2956 | TGgcacccttGCAA | VSIR\|PDCD1LG2 | |
| 2957 | AGGataatgcagCAA | CEACAM1\|CD276 | |
| 2958 | AGGataatgcaGCAA | CEACAM1\|CD276 | |
| 2959 | AGGAtaatgcaGCAA | CEACAM1\|CD276 | |
| 2960 | TAGGataatgcagcAA | CEACAM1\|CD276 | |
| 2961 | TAGGataatgcagCAA | CEACAM1\|CD276 | |
| 2962 | TAGGataatgcaGCAA | CEACAM1\|CD276 | |
| 2963 | ATAGgataatgcagcAA | CEACAM1\|CD276 | |
| 2964 | ATAGgataatgcagcAA | CEACAM1\|CD276 | |
| 2965 | ATAGgataatgcaGCAA | CEACAM1\|CD276 | |
| 2966 | GAGgctcagtccAA | NT5E\|VSIR | |
| 2967 | GAGgctcagtcCAA | NT5E\|VSIR | |
| 2968 | GAGgctcagtCCAA | NT5E\|VSIR | |
| 2969 | TGaggctcagtcCAA | NT5E\|VSIR | |
| 2970 | TGAGgctcagtccAA | NT5E\|VSIR | |
| 2971 | TGAGgctcagtcCAA | NT5E\|VSIR | |
| 2972 | CTgaggctcagtccAA | NT5E\|VSIR | |
| 2973 | CTgaggctcagtcCAA | NT5E\|VSIR | |
| 2974 | CTGAggctcagtccAA | NT5E\|VSIR | |
| 2975 | AAaagaggaacCCAA | CEACAM1\|CD80 | |
| 2976 | AAAagaggaacCCAA | CEACAM1\|CD80 | |
| 2977 | AAAAgaggaacCCAA | CEACAM1\|CD80 | |
| 2978 | AAaaagaggaacCCAA | CEACAM1\|CD80 | |
| 2979 | AAAaagaggaacCCAA | CEACAM1\|CD80 | |
| 2980 | AAAAagaggaacCCAA | CEACAM1\|CD80 | |
| 2981 | TAaaaagaggaacCCAA | CEACAM1\|CD80 | |
| 2982 | TAAaaagaggaacCCAA | CEACAM1\|CD80 | |
| 2983 | TAAAaagaggaacCCAA | CEACAM1\|CD80 | |
| 2984 | ATTttccttgtACAA | NT5E\|CD80 | |
| 2985 | ATTTtccttgtaCAA | NT5E\|CD80 | |
| 2986 | ATTTtccttgtACAA | NT5E\|CD80 | |
| 2987 | AATtttccttgtACAA | NT5E\|CD80 | |
| 2988 | AATTttccttgtaCAA | NT5E\|CD80 | |
| 2989 | AATTttccttgtACAA | NT5E\|CD80 | |
| 2990 | TAAttttccttgtACAA | NT5E\|CD80 | |
| 2991 | TAATtttccttgtaCAA | NT5E\|CD80 | |
| 2992 | TAATtttccttgtACAA | NT5E\|CD80 | |
| 2993 | CTAAttttccttgtacAA | NT5E\|CD80 | |
| 2994 | CTAattttccttgtaCAA | NT5E\|CD80 | |
| 2995 | CTAAttttccttgtACAA | NT5E\|CD80 | |
| 2996 | TAaagaatagaaGAAA | VTCN1\|TDO2 | |
| 2997 | TAAagaatagaaGAAA | VTCN1\|TDO2 | |
| 2998 | TAAAgaatagaaGAAA | VTCN1\|TDO2 | |
| 2999 | CTaaagaatagaaGAAA | VTCN1\|TDO2 | |
| 3000 | CTAaagaatagaaGAAA | VTCN1\|TDO2 | |
| 3001 | CTAAagaatagaaGAAA | VTCN1\|TDO2 | |
| 3002 | GAggctcagtccaAA | NT5E\|VSIR | |
| 3003 | GAggctcagtcCAAA | NT5E\|VSIR | |
| 3004 | GAGGctcagtcCAAA | NT5E\|VSIR | |
| 3005 | TGaggctcagtccaAA | NT5E\|VSIR | |
| 3006 | TGAggctcagtccaAA | NT5E\|VSIR | |
| 3007 | TGAggctcagtcCAAA | NT5E\|VSIR | |
| 3008 | CTgaggctcagtccaAA | NT5E\|VSIR | |
| 3009 | CTGaggctcagtccAAA | NT5E\|VSIR | |
| 3010 | CTGAggctcagtccaAA | NT5E\|VSIR | |
| 3011 | AAAGaggaacccAAA | CEACAM1\|CD80 | |
| 3012 | AAAgaggaaccCAAA | CEACAM1\|CD80 | |
| 3013 | AAAGaggaaccCAAA | CEACAM1\|CD80 | |
| 3014 | AAaagaggaaccCAAA | CEACAM1\|CD80 | |
| 3015 | AAAagaggaaccCAAA | CEACAM1\|CD80 | |
| 3016 | AAAAgaggaaccCAAA | CEACAM1\|CD80 | |
| 3017 | AAaaagaggaaccCAAA | CEACAM1\|CD80 | |
| 3018 | AAAaagaggaaccCAAA | CEACAM1\|CD80 | |
| 3019 | AAAAagaggaaccCAAA | CEACAM1\|CD80 | |
| 3020 | TAaaaagaggaaccCAAA | CEACAM1\|CD80 | |
| 3021 | TAAaaagaggaaccCAAA | CEACAM1\|CD80 | |
| 3022 | TAAAaagaggaaccCAAA | CEACAM1\|CD80 | |
| 3023 | TAAagaatagaagAAAA | VTCN1\|TDO2 | |
| 3024 | TAAAgaatagaagaAAA | VTCN1\|TDO2 | |
| 3025 | TAAAgaatagaagAAAA | VTCN1\|TDO2 | |
| 3026 | CTAAagaatagaagaAAA | VTCN1\|TDO2 | |
| 3027 | CTAaagaatagaagAAAA | VTCN1\|TDO2 | |
| 3028 | CTAAagaatagaagAAAA | VTCN1\|TDO2 | |
| 3029 | AAGAggaacccaaAA | CEACAM1\|CD80 | |
| 3030 | AAGAggaacccaAAA | CEACAM1\|CD80 | |
| 3031 | AAGAggaacccAAAA | CEACAM1\|CD80 | |
| 3032 | AAAGaggaacccaaAA | CEACAM1\|CD80 | |
| 3033 | AAAGaggaacccaAAA | CEACAM1\|CD80 | |
| 3034 | AAAGaggaacccAAAA | CEACAM1\|CD80 | |
| 3035 | AAAAgaggaacccaaAA | CEACAM1\|CD80 | |
| 3036 | AAAAgaggaacccaAAA | CEACAM1\|CD80 | |
| 3037 | AAAAgaggaacccAAAA | CEACAM1\|CD80 | |
| 3038 | AAAaagaggaacccAAAA | CEACAM1\|CD80 | |
| 3039 | AAAAagaggaacccaAAA | CEACAM1\|CD80 | |
| 3040 | AAAAagaggaacccAAAA | CEACAM1\|CD80 | |
| 3041 | TAAaaagaggaacccAAAA | CEACAM1\|CD80 | |
| 3042 | TAAAaagaggaacccaAAA | CEACAM1\|CD80 | |
| 3043 | TAAAaagaggaacccAAAA | CEACAM1\|CD80 | |

[0159] Example 5. Design of LNA-Modified Antisense Oligonucleotides for Knockdown of Targets in both Human and Mouse.

[0160] LNA antisense oligonucleotides that can effectively knock down targets listed in Table 1.1 and 1.2 in both human and mouse were designed. In this example, the target regions are shared by orthologous sequences in human and mouse (Table 4.1: SEQ ID NOs: 1473-1503).

TABLE 4.1

| SEQ ID NO | target sequence (5′-3′) | target |
|---|---|---|
| 1473 | UGAAAGUCAAUGGUAAGAAU | CD274 |
| 1474 | UGAAAGUCAAUGGUAAG | CD274 |
| 1475 | CCUGGCUUUCGUGUGCU | CD276 |
| 1476 | ACAGACACCAAACAGCU | CD276 |
| 1477 | CGUGUGCUGGAGAAAGA | CD276 |
| 1478 | UUUCGUGUGCUGGAGAA | CD276 |
| 1479 | GUGUGCUGGAGAAAGAUCAA | CD276 |
| 1480 | UCAGAAAACAAAAGAUC | CD80 |
| 1481 | UUAGAAUAUUACCUCAU | CD86 |
| 1482 | CGAUUCUGCUUCUAG | CD86 |
| 1483 | CAUAAAUUUGACCUGC | CD86 |
| 1484 | UUGUAUGCAAAUAGGC | CD86 |
| 1485 | UCUCUAGUCAGUUCCC | CD86 |
| 1486 | UUAGCCCUGAAACUGAC | CD86 |
| 1487 | UAGUAUUUUGGCAGGA | CD86 |
| 1488 | UCUUACAACAGGGGUCUAU | CTLA4 |
| 1489 | GGUUUGAAUAUAAACACUAU | CTLA4 |
| 1490 | CAGCCUUAUUUUAUUCCCAU | CTLA4 |
| 1491 | CAGGGGUCUAUGUGAAAAUG | CTLA4 |
| 1492 | CAGAGCCAGAAUGUGAAAAG | CTLA4 |
| 1493 | GCCUUAUUUUAUUCCCAUCA | CTLA4 |
| 1494 | GAGAAUGCUGAGUUCAU | HMOX1 |
| 1495 | GUCUCUCUAUUGGUGGAAAU | IDO1 |
| 1496 | AGAUGUUCUCUGUAAGUCUA | LGALS9 |
| 1497 | AUGCCACCAUUGUCUU | PDCD1 |
| 1498 | GAAAGUCAAAGGUGAGU | PDCD1LG2 |
| 1499 | CGCCUGGGACUACAAGU | PDCD1LG2 |
| 1500 | AUCAAAGUGACAGGUGGGU | VTCN1 |
| 1501 | GAGAAUGUGACCAUGAAGGU | VTCN1 |
| 1502 | GACUGGUUUUGCUGGAGGAU | VTCN1 |
| 1503 | CUGAGAAUGUGACCAUGAAG | VTCN1 |

TABLE 4.2

| SEQ ID NO | target sequence (5′-3′) | target |
|---|---|---|
| 3044 | CCACAGUAAGUAAAGCCA | CEACAM1 |
| 3045 | AACGUAUAUGAAGUGGAG | HAVCR2 |
| 3046 | CACCUACAGAGAUGGCUU | LAG3 |
| 3047 | AUAAUUAUUCUACCCAGG | NT5E |
| 3048 | CACCAAGUGUCGAGUGC | NT5E |
| 3049 | GGGAAGUACCCAUUCAUA | NT5E |
| 3050 | ACCAGCUUCUGGCCAUUU | TIGIT |
| 3051 | AAAGGGCACGAUGUGAC | VSIR |
| 3052 | CAAUAAACACAUCUGAGA | VSIR |

[0161] The LNA ASOs listed in Table 5.1 below (Table 5.1: SEQ ID NOs: 1504-1534; LNA shown in uppercase, DNA in lowercase), were designed against each of the target sites listed in Table 4.1 above.

TABLE 5.1

| SEQ ID NO | Oligonucleotide | target |
|---|---|---|
| 1504 | ATtcttaccattgactttCA | CD274 |
| 1505 | CTTAccattgactttCA | CD274 |
| 1506 | AGcacacgaaagccaGG | CD276 |
| 1507 | AGctgtttggtgtctGT | CD276 |
| 1508 | TCTttctccagcacACG | CD276 |
| 1509 | TTCtccagcacacGAAA | CD276 |
| 1510 | TTgatctttctccagcacAC | CD276 |
| 1511 | GATCttttgttttctGA | CD80 |
| 1512 | ATGAggtaatattCTAA | CD86 |
| 1513 | CTAGaagcagaATCG | CD86 |
| 1514 | GCAggtcaaatttATG | CD86 |
| 1515 | GCctatttgcataCAA | CD86 |
| 1516 | GGgaactgactaGAGA | CD86 |
| 1517 | GTcagtttcagggcTAA | CD86 |
| 1518 | TCCTgccaaaataCTA | CD86 |
| 1519 | ATagacccctgttgtaaGA | CTLA4 |
| 1520 | ATAgtgtttatattcaAACC | CTLA4 |
| 1521 | ATGGgaataaaataaggcTG | CTLA4 |
| 1522 | CAttttcacatagaccccTG | CTLA4 |
| 1523 | CTtttcacattctggctcTG | CTLA4 |
| 1524 | TGatgggaataaaataaGGC | CTLA4 |
| 1525 | ATgaactcagcatTCTC | HMOX1 |
| 1526 | ATTtccaccaatagagagAC | IDO1 |
| 1527 | TAGacttacagagaacaTCT | LGALS9 |
| 1528 | AAGacaatggtgGCAT | PDCD1 |
| 1529 | ACTCacctttgacttTC | PDCD1LG2 |
| 1530 | ACttgtagtcccaggCG | PDCD1LG2 |
| 1531 | ACccacctgtcactttgAT | VTCN1 |
| 1532 | ACcttcatggtcacattcTC | VTCN1 |
| 1533 | ATcctccagcaaaaccagTC | VTCN1 |
| 1534 | CTtcatggtcacattctcAG | VTCN1 |

[0162] The LNA ASOs listed in Table 5.2 below (Table 5.2: SEQ ID NOs: 3053-3061; LNA shown in uppercase, DNA in lowercase), were designed against each of the target sites listed in Table 4.2 above.

TABLE 5.2

| SEQ ID NO | Oligonucleotide | target |
|---|---|---|
| 3053 | TGgctttacttactgtGG | CEACAM1 |
| 3054 | CTccacttcatatacGTT | HAVCR2 |
| 3055 | AAgccatctctgtaggTG | LAG3 |
| 3056 | CCtgggtagaataaTTAT | NT5E |
| 3057 | GCactcgacacttggTG | NT5E |
| 3058 | TAtgaatgggtacttcCC | NT5E |
| 3059 | AAAtggccagaagctgGT | TIGIT |
| 3060 | GTcacatcgtgccctTT | VSIR |
| 3061 | TCTcagatgtgtttaTTG | VSIR |

[0163] Example 6. Design of LNA-Modified Antisense Oligonucleotides for Knockdown of Targets in Human.

[0164] LNA antisense oligonucleotides that can effectively knock down targets listed in Table 1.1 and 1.2 in human were designed. In this example, the target regions are listed in Table 6.1 and 6.2 (Table 6.1: SEQ ID NOs: 1535-1593 and 1654 and Table 6.2: SEQ ID NOs: 3062-3097). These target regions are selected so that they will not be identical to target regions in other immune checkpoint proteins, and so that there will be a minimum of off target effects. The target regions in Table 6.1 and 6.2 are therefore preferred target regions. LNA ASOs were designed against each of these target sites (Table 7.1: SEQ ID NOs: 1594-1653 and Table 7.2: SEQ ID NOs: 3098-3133).

TABLE 6.1
Preferred target regions in Immune Checkpoint
Proteins. (These target regions are targeted by
the oligonucleotides described in Table 7.1).

| SEQ ID NO | target sequence (5′-3′) | target | oligoID |
|---|---|---|---|
| 1535 | GCCGUUUUGUAUUAACU | CD274 | |
| 1536 | CGACCAGAUAAAGUGAU | CD274 | |
| 1537 | UUAUCACUAUCACUUCG | CD274 | |
| 1538 | ACGUAUCUUAAUCCUGA | CD274 | |
| 1539 | CGGGGUGAAUAGGUGUU | CD276 | |
| 1540 | CAAAUACGACAGAGGCU | CD276 | |
| 1541 | GUACGAUUCUUCAUCUC | CD276 | |
| 1542 | GCCUCGUCCAUUCCCAC | CD276 | |
| 1543 | GACCACCCACAACCUUA | CD276 | |
| 1544 | GAGCAUAGGUAAUCGUA | CD276 | |
| 1545 | CCCAUCUACGUCCCUCA | CD276 | |
| 1546 | ACCCACUACCUCACCUU | CD80 | |
| 1547 | GAAAACGGAGUGCAAC | CD80 | |
| 1548 | AUUACUACACCCGCCA | CD80 | |
| 1549 | GUGGACGGAGAUUAGU | CD86 | |
| 1550 | CGAAGAUGGAUAGGAAC | CD86 | |
| 1551 | AUGGUAAUAUGUCGUAA | CD86 | |
| 1552 | UGAAGACCUGAACACCG | CTLA4 | |
| 1553 | ACACCGCUCCCAUAAAG | CTLA4 | |
| 1554 | CCCAACGAAAAGCACAU | HMOX1 | |
| 1555 | ACGCCCACCUGUUAAU | HMOX1 | |
| 1556 | CUCGAAUUUGCCUCUGA | HMOX1 | |
| 1557 | GUUGACGGGAUAAUAGA | IDO1 | |
| 1558 | AGGUAGACGGGCGAGU | LGALS9 | |
| 1559 | CGUCGUUCAGUGGGGAU | LGALS9 | |
| 1560 | CUUAAACUAACGCAGG | LGALS9 | |
| 1561 | CGGUGGAUAAAGGUUCA | LGALS9 | |
| 1562 | CUGGUGGUUGGUGUCGU | PDCD1 | |
| 1563 | GUUCGAGUGAGGACAGU | PDCD1 | |
| 1564 | GUCCUGUAAUGCGGUCU | PDCD1 | |
| 1565 | GUCUGGGCGGUGCUACA | PDCD1 | |
| 1566 | CGGAAACGAAGAGUAU | PDCD1LG2 | |
| 1567 | GUCGUUCGUUAUAUGG | PDCD1LG2 | |
| 1568 | AGGUUACUCCACUUCG | PDCD1LG2 | |
| 1569 | CCGCUGUGAGACCAUU | TNFRSF14 | |
| 1570 | CGGUCGGCAAGGUUGU | TNFRSF14 | |
| 1571 | GCGGCAGGUUAUCGUG | TNFRSF14 | |
| 1572 | CGUAGGUCGUCAUAGG | VTCN1 | |
| 1573 | UUACGAGGCAUGAUAG | VTCN1 | |
| 1574 | UGUGUCCCGUAUCGCC | VTCN1 | |
| 1575 | GCGAUGCGACUAUGAC | VTCN1 | |
| 1576 | GAGACUACGAGAGUAA | VTCN1 | |
| 1577 | GUUGCCUGACCUACGU | CTLA4 | CRM0095 |
| 1578 | AUGACGUUUGAUCUGUAC | CTLA4 | CRM0096 |
| 1579 | AAAGUGUACCUGUUCG | PDCD1 | CRM0097 |
| 1580 | UUCGUGCUAAACUGGUAC | PDCD1 | CRM0098 |
| 1581 | AUCACUCUCCAGAUACAC | CD274 | CRMO129 |
| 1582 | AUCACUCUCCAGAUACACA | CD274 | CRM0130 |
| 1583 | AAAGUCAAUGGUAAGAAUUA | CD274 | CRMO131 |
| 1584 | GUGUGGGUUCAAACACAU | CTLA4 | CRMO132 |
| 1585 | UCUGUGUGGGUUCAAACA | CTLA4 | CRMO133 |
| 1586 | CAGUCCGUGAGUUUGUC | IDO1 | CRMO134 |
| 1587 | GUCUCUCUAUUGGUGGA | IDO1 | CRM0135 |
| 1588 | UAUGCCACCAUUGUCUU | PDCD1 | CRMO136 |
| 1589 | CACCUUCACCUGCAGCUU | PDCD1 | CRMO137 |
| 1590 | GUCACCAGUGUUCUGCG | PDCD1LG2 | CRMO138 |
| 1591 | GAAAGUCAAAGGUGAGUG | PDCD1LG2 | CRMO139 |
| 1592 | AGAGGGCAGGACAUUU | CTLA4 | CRM0104 |
| 1593 | AGAGGGCAGGACAUUU | CTLA4 | CRM0105 |
| 1654 | GAGUAUUCAUAGCGGA | IDO1 | CRMO187 |

TABLE 6.2
Preferred target regions in Immune Checkpoint
Proteins. (These target regions are targeted by
the oligonucleotides described in Table 7.2)

| SEQ ID NO | target sequence (5′-3′) | target | oligoID |
|---|---|---|---|
| 3062 | GGGACGUAUUGGUGUG | CEACAM1 | |
| 3063 | CCUGCCUCUAUUACGGA | CEACAM1 | |
| 3064 | GUUUCUGCGAUUAUGGU | HAVCR2 | |
| 3065 | CCCUAAACUAUGCGUG | HAVCR2 | |
| 3066 | GGCUCUUAUCUUCGGC | HAVCR2 | |
| 3067 | ACUCUAUUCCGUGUUAC | HAVCR2 | |
| 3068 | GGUGGUUGUAAUGUAUAA | HAVCR2 | |
| 3069 | CAGGGUUAGACUACGGU | KIR2DL1 | |
| 3070 | GCUCCCUCUUAACGCA | KIR2DL1 | |
| 3071 | AGUUCUAGGAUGACACAA | KIR2DL1 | |
| 3072 | CCGACGUGAUGAAACAUU | KIR2DL3 | |
| 3073 | UUAGCUCUGUAUAUGGGU | KIR2DL3 | |
| 3074 | GUAGCCAUAGAAACGUG | KIR2DL3 | |
| 3075 | CACCAUGUCUUUGCGGG | KIR2DL3 | |
| 3076 | ACCGCAAUUCCAUCUAC | KIR2DL3 | |
| 3077 | AUAAAUCCGUCCCUUGG | LAG3 | |
| 3078 | GCCGCCUUACCCUGAAC | LAG3 | |
| 3079 | GCGACUUUACCCUUCGA | LAG3 | |
| 3080 | CUUGUCCUCGUACUAUU | NT5E | |
| 3081 | ACUUCCGCUUACCGCU | NT5E | |
| 3082 | AGCCCGUCUACUUGUC | NT5E | |
| 3083 | GCUUGACUACUGAUAAC | NT5E | |
| 3084 | ACAUGAUAAGAUACACU | TDO2 | |
| 3085 | UGAUGAGAUUCGUCCAU | TDO2 | |
| 3086 | GCAAUUCCGACUAUUAG | TDO2 | CRM0288 |
| 3087 | CGUCCCUACUGUUAUUA | TDO2 | CRM0289 |
| 3088 | CACAAGUACGAAACAUA | TDO2 | CRM0290 |
| 3089 | GGUAACUGAACCGCUU | TIGIT | |
| 3090 | CCUAUCCUAAUACUAUCU | TIGIT | |
| 3091 | AGACCUUAUGCGAUGCU | TIGIT | |
| 3092 | ACUAACUAUUUACCCUAU | TIGIT | |
| 3093 | UUCGGCUUACUCUAUA | TIGIT | |
| 3094 | CCUAUACUGUUGACCCA | TIGIT | |
| 3095 | CGUGAAUACUGUGUAAU | VSIR | |
| 3096 | CUUAGUGCGGUGUCGG | VSIR | |
| 3097 | UGACGCUUCCUUUCUUAG | VSIR | |

TABLE 7.1
LNA ASOs targeting the target regions listed in
Table 6.1 (LNA shown in uppercase, DNA lowercase)

| SEQ | | | | Target |
|---|---|---|---|---|
| ID | | | | region is |
| NO | Oligonucleotide | target | oligoID | SEQ ID NO |
| 1594 | AGTTaatacaaaaCGGC | CD274 | | 1535 |
| 1595 | ATcactttatctgGTCG | CD274 | | 1536 |
| 1596 | CGAAgtgatagtgATAA | CD274 | | 1537 |
| 1597 | TCAggattaagataCGT | CD274 | CRM0185 | 1538 |
| 1598 | AAcacctattcaccCCG | CD276 | | 1539 |
| 1599 | AGcctctgtcgtattTG | CD276 | | 1540 |
| 1600 | GAGatgaagaatcGTAC | CD276 | | 1541 |
| 1601 | GTgggaatggacgagGC | CD276 | | 1542 |
| 1602 | TAaggttgtgggtggTC | CD276 | | 1543 |
| 1603 | TAcgattacctatgCTC | CD276 | | 1544 |
| 1604 | TGagggacgtagatGGG | CD276 | | 1545 |
| 1605 | AAggtgaggtagtggGT | CD80 | | 1546 |
| 1606 | GTtgcactccgttTTC | CD80 | | 1547 |
| 1607 | TGgcgggtgtagTAAT | CD80 | | 1548 |
| 1608 | ACtaatctccgtcCAC | CD86 | | 1549 |
| 1609 | GTtcctatccatcttCG | CD86 | | 1550 |
| 1610 | TTACgacatattaCCAT | CD86 | | 1551 |
| 1611 | CGgtgttcaggtcttCA | CTLA4 | | 1552 |
| 1612 | CTttatgggagcggTGT | CTLA4 | | 1553 |
| 1613 | ATGtgcttttcgttgGG | HMOX1 | | 1554 |
| 1614 | ATtaacaggtgggCGT | HMOX1 | | 1555 |
| 1615 | TCagaggcaaattCGAG | HMOX1 | | 1556 |
| 1616 | TCTattatcccgtcaAC | IDO1 | | 1557 |
| 1617 | ACtcgcccgtctacCT | LGALS9 | | 1558 |
| 1618 | ATCCccactgaacgaCG | LGALS9 | | 1559 |
| 1619 | CCTgcgttagtttaAG | LGALS9 | | 1560 |
| 1620 | TGAacctttatccacCG | LGALS9 | | 1561 |
| 1621 | ACGacaccaaccaccAG | PDCD1 | | 1562 |
| 1622 | ACTgtcctcactcgaAC | PDCD1 | | 1563 |
| 1623 | AGAccgcattacaggAC | PDCD1 | | 1564 |
| 1624 | TGtagcaccgcccagAC | PDCD1 | | 1565 |
| 1625 | ATActcttcgtttcCG | PDCD1LG2 | CRM0190 | 1566 |
| 1626 | CCAtataacgaaCGAC | PDCD1LG2 | | 1567 |
| 1627 | CGAagtggagtaaCCT | PDCD1LG2 | | 1568 |
| 1628 | AAtggtctcacagCGG | TNFRSF14 | | 1569 |
| 1629 | ACAAccttgccgacCG | TNFRSF14 | | 1570 |
| 1630 | CACgataacctgccGC | TNFRSF14 | | 1571 |
| 1631 | CCtatgacgacctACG | VTCN1 | | 1572 |
| 1632 | CTAtcatgcctcgTAA | VTCN1 | | 1573 |
| 1633 | GGcgatacgggacaCA | VTCN1 | | 1574 |
| 1634 | GTcatagtcgcatcGC | VTCN1 | | 1575 |
| 1635 | TTActctcgtagtCTC | VTCN1 | | 1576 |
| 1636 | ACGTaggtcaggcAAC | CTLA4 | CRM0095 | 1577 |
| 1637 | GTACagatcaaacgtCAT | CTLA4 | CRM0096 | 1578 |
| 1638 | CGAAcaggtacaCTTT | PDCD1 | CRM0097 | 1579 |
| 1639 | GTACcagtttagcacGAA | PDCD1 | CRM0098 | 1580 |
| 1640 | GTgtatctggagagtGAT | CD274 | CRM0129 | 1581 |
| 1641 | TGtgtatctggagagtgAT | CD274 | CRM0130 | 1582 |
| 1642 | TAAttcttaccattgaCTTT | CD274 | CRM0131 | 1583 |
| 1643 | ATgtgtttgaacccacAC | CTLA4 | CRM0132 | 1584 |
| 1644 | TGtttgaacccacacaGA | CTLA4 | CRM0133 | 1585 |
| 1645 | GACAaactcacggacTG | IDO1 | CRM0134 | 1586 |
| 1646 | TCcaccaatagagAGAC | IDO1 | CRM0135 | 1587 |
| 1647 | AAgacaatggtggCATA | PDCD1 | CRM0136 | 1588 |
| 1648 | AAgctgcaggtgaaggTG | PDCD1 | CRM0137 | 1589 |
| 1649 | CGcagaacactggtGAC | PDCD1LG2 | CRM0138 | 1590 |
| 1650 | CActcacctttgacttTC | PDCD1LG2 | CRM0139 | 1591 |
| 1651 | AAAtgtcctgccctCT | CTLA4 | CRM0104 | 1592 |
| 1652 | AAatgTcctgccctCT | CTLA4 | CRM0105 | 1593 |
| 1653 | TCCgctatgaatacTC | IDO1 | CRM0187 | 1654 |

TABLE 7.2
LNA ASOs targeting the target regions listed in
Table 6.2 (LNA shown in uppercase, DNA lowercase)

| SEQ | | | | Target |
|---|---|---|---|---|
| ID | | | | region is |
| NO | Oligonucleotide | target | oligoID | SEQ ID NO |
| 3098 | CAcaccaatacgtcCC | CEACAM1 | | 3062 |
| 3099 | TCcgtaatagaggcaGG | CEACAM1 | | 3063 |
| 3100 | ACCAtaatcgcagaAAC | HAVCR2 | | 3064 |
| 3101 | CACgcatagtttagGG | HAVCR2 | | 3065 |
| 3102 | GCcgaagataagagCC | HAVCR2 | | 3066 |
| 3103 | GTaacacggaataGAGT | HAVCR2 | | 3067 |
| 3104 | TTAtacattacaacCACC | HAVCR2 | | 3068 |
| 3105 | ACcgtagtctaacccTG | KIR2DL1 | | 3069 |
| 3106 | TGcgttaagagggaGC | KIR2DL1 | | 3070 |
| 3107 | TTgtgtcatcctagaaCT | KIR2DL1 | | 3071 |
| 3108 | AATgtttcatcacgtcGG | KIR2DL3 | | 3072 |
| 3109 | ACCcatatacagagcTAA | KIR2DL3 | | 3073 |
| 3110 | CACGtttctatggctAC | KIR2DL3 | | 3074 |
| 3111 | CCCgcaaagacatggTG | KIR2DL3 | | 3075 |
| 3112 | GTagatggaattgcGGT | KIR2DL3 | | 3076 |
| 3113 | CCaagggacggattTAT | LAG3 | | 3077 |
| 3114 | GTtcagggtaaggcgGC | LAG3 | | 3078 |
| 3115 | TCgaagggtaaagtCGC | LAG3 | | 3079 |
| 3116 | AATAgtacgaggaCAAG | NT5E | | 3080 |
| 3117 | AGcggtaagcggaAGT | NT5E | | 3081 |
| 3118 | GACaagtagacgggCT | NT5E | | 3082 |
| 3119 | GTtatcagtagtcaAGC | NT5E | | 3083 |
| 3120 | AGTgtatcttatcaTGT | TD02 | | 3084 |
| 3121 | ATGgacgaatctcatCA | TD02 | | 3085 |
| 3122 | CTaatagtcggaatTGC | TD02 | CRM0288 | 3086 |
| 3123 | TAATaacagtaggGACG | TD02 | CRM0289 | 3087 |
| 3124 | TAtgtttcgtacttGTG | TD02 | CRM0290 | 3088 |
| 3125 | AAgcggttcagttACC | TIGIT | | 3089 |
| 3126 | AGATagtattaggatAGG | TIGIT | | 3090 |
| 3127 | AGcatcgcataaggtCT | TIGIT | | 3091 |
| 3128 | ATagggtaaatagtTAGT | TIGIT | | 3092 |
| 3129 | TATagagtaagcCGAA | TIGIT | | 3093 |
| 3130 | TGggtcaacagtataGG | TIGIT | | 3094 |
| 3131 | ATTAcacagtattcaCG | VSIR | | 3095 |
| 3132 | CCgacaccgcactaAG | VSIR | | 3096 |
| 3133 | CTAAgaaaggaagcgtCA | VSIR | | 3097 |

[0165] Example 7. Antisense Oligonucleotide-Mediated Knockdown of Immune Checkpoint Proteins in Cultured Cancer Cells

[0166] Chronic myelogenous leukemia cell line K562 (ECACC cat. no. 89121407) was purchased from Sigma and maintained in RPMI1640 medium (Sigma cat. no. R0883) supplemented with 10% fetal calf serum (Sigma cat. no. F2442), 2 mM L-glutamine (Sigma cat. no. G7513) and penicillin/streptomycin (Sigma cat. no. P4333) in a humidified 5% CO2 incubator at 37° C. and passaged twice a week.

[0167] For unassisted uptake of the immune checkpoint-targeting antisense oligonucleotides listed in Table 7.1, K562 cells were seeded in 12-well cell culture plates and transfected essentially as described in Soifer et al. (Methods Mol Biol. 2012; 815: 333-46) using ASOs in a concentration range of 0.1 μM-2.5 μM final concentration. A scrambled oligonucleotide and mock transfection were included as controls. Three to six days after transfection total RNA was isolated from the cells using the RNeasy mini kit (Qiagen) according to the manufacturer's instructions and 1 μg total RNA was reverse transcribed into cDNA using the High Capacity cDNA reverse transcription kit (Life Technologies cat. no. 4374967) according to the protocol provided by the manufacturer.

[0168] Target mRNA levels were determined by quantitative RT-PCR using Taqman Gene Expression Master Mix (ABI cat. no. 4369542) and pre-designed Taqman assays for CTLA-4 (IDT Hs.PT.58.3907580) and PDCD1 (IDT Hs.PT.58.39641096). Furthermore, the expression of GAPDH mRNA was measured (IDT Hs.PT.58.40035104) and used as an endogenous control. qRT-PCR reactions were carried out on a Quantstudio 6 Flex Real-Time thermocycler (ABI).

[0169] Examples of ASO-mediated CTLA-4 and PDCD1 knockdown in K562 cells using ASO's with oligo id's: CRM0095, CRM0096, CRM0097, CRM0098, CRM0104 and CRM0105 (listed in Table 7.1), are shown in FIGS. 1, 2, 3 and 4.

[0170] Example 8. Antisense-Mediated Knockdown of Immune Checkpoint-Encoding mRNAs in Cultured Cancer Cells Using Bispecific Antisense Oligonucleotides

[0171] Human glioblastoma cell line GMS-10 (DSMZ cat. no. ACC405) was purchased from Leibniz Institue DSMZ-German Collection of Microorganisms and Cell Cultures and maintained in 85-90% Dulbecco's MEM (Sigma cat. no. D6546), 10-15% fetal bovine serum (Sigma cat. no. F2442), 2 mM L-glutamine (Sigma cat. no. G7513), and penicillin/streptomycin (Sigma cat. no. P4333) in a humidified 5% CO2 incubator at 37° C. and passaged twice a week.

[0172] For transfection of the immune checkpoint-targeting antisense oligonucleotides listed in Table 3.1 and 3.2, GMS-10 cells were seeded in 6-well cell culture plates and transfected using 5 μL/mL Lipofectamine 2000 (Thermo Fisher Scientific cat. no. 11668027) using antisense oligonucleotides at a 25 nM final concentration. A scrambled oligonucleotide and mock transfection were included as controls. Briefly, cells were seeded at 200.000 cells/well 24 hr before transfection. For transfections, cells were washed in Opti-Mem (Thermo Fisher Scientific cat. no. 51985-026) followed by 7-minute treatment of Lipofectamin in 900 μL Opti-Mem. Antisense oligonucleotides were added and cells incubated at 5% CO2 at 37° C. for 4 hours. Cells were washed once in Opti-Mem and 2.5 mL Dulbecco's MEM was then added to cells.

[0173] 24 hours after transfection total RNA was isolated from the cells using the RNeasy mini kit (Qiagen) according to the manufacturer's instructions and 1 μg total RNA was reverse transcribed into cDNA using the High Capacity cDNA reverse transcription kit (Life Technologies cat. no. 4374967) according to the protocol provided by the manufacturer.

[0174] Target mRNA levels were determined by quantitative PCR using Taqman Gene Expression Master Mix (ABI cat. no. 4369542) and pre-designed Taqman assays for PDL1 (CD274) (IDT cat. no. Hs.PT.58.4665575), PDL2 (PDCD1LG2) (IDT cat. no. Hs.PT.58.21416962), and IDO1 (IDT cat. no. Hs.PT.58.924731) furthermore the expression of TBP mRNA was measured (IDT cat. no. Hs.PT.58v.39858774) and used as an endogenous control in calculation of expression changes using the ΔΔCt method with efficiency correction. Values were normalized to Mock.

[0175] Quantitative PCR was carried out on a Quantstudio 6 Flex Real-Time thermocycler (ABI)

[0176] Examples of bispecific antisense oligonucleotide-mediated knockdown of PDL1/IDO1, PDL1/PDL2 and PDL2/IDO1 in GMS-10 cells are shown in FIG. 5.

[0177] Example 9. Antisense-Mediated Downregulation of Immune Checkpoint Proteins in Cultured Cancer Cells Using Bispecific Antisense Oligonucleotides

[0178] Human glioblastoma cell line GMS-10 (DSMZ cat. no. ACC405) was purchased from Leibniz Institue DSMZ-German Collection of Microorganisms and Cell Cultures and maintained in 85-90% Dulbecco's MEM (Sigma cat. no. D6546), 10-15% fetal bovine serum (Sigma cat. no. F2442), 2 mM L-glutamine (Sigma cat. no. G7513), and penicillin/streptomycin (Sigma cat. no. P4333) in a humidified 5% CO2 incubator at 37° C. and passaged twice a week.

[0179] For transfection of the immune checkpoint antisense oligonucleotides listed in Table 7.1 or 7.2, GMS-10 cells were seeded in 6-well cell culture plates and transfected using 5 μL/mL Lipofectamine 2000 (Thermo Fisher Scientific cat. no. 11668027) using antisense oligonucleotides at a 25 nM final concentration. A scrambled oligonucleotide and mock transfection were included as controls. Briefly, cells were seeded at 200.000 cells/well 24 hr before transfection. For transfections, cells were washed in Opti-Mem (Thermo Fisher Scientific cat. no. 51985-026) followed by 7-minute treatment of Lipofectamin in 900 μL Opti-Mem. Antisense oligonucleotides were added and cells incubated at 5% CO2 at 37° C. for 4 hours. Cells were washed once in Opti-Mem and 2.5 mL Dulbecco's MEM was then added to cells.

[0180] 48 hours after transfection total protein was isolated from the cells scrapped from the well. Cells were lysed in RIPA buffer supplemented with complete proteinase inhibitor cocktail (Sigma cat. no. 000000011697498001). Cells were passed through a syringe ten times to ensure efficient lysis. Cell debris was removed by a ten-minute centrifugation at 8000×g.

[0181] Protein levels were assessed by western blotting. Proteins samples were denatured in NuPAGE LDS sample buffer (Invitrogen cat. no. NP0007) with NuPAGE reducing agent (Invitrogen cat. no. NP0004). Proteins were separated on Mini-PROTEAN TGX gels (Bio Rad cat. no. 456,8123) in TGS running buffer (Bio Rad cat. no. 161-0732).

[0182] Proteins were transferred to a nitrocellulose membrane using Trans-Blot Turbo transfer packs (Bio Rad cat. no. 170-4159). Membranes were blocked with TBS Tween (Thermo Scientific cat. no. 28360) supplemented with 5% skimmed milk powder (Sigma cat. no. 70166). Antibody incubation was performed in TBS tween with 5% skimmed milk powder. The following antibodies were used: 1) PDL1 antibody (1:1000, Abcam cat. no. ab213524) and secondary anti-rabbit antibody (1:10000, Dako cat. no. P0448). Vinculin was used as loading control; the following antibodies were used (Vinculin antibody 1:2000, Sigma cat. no. V9131 and secondary anti-mouse antibody, 1:10000, Dako cat. no. P0447). Protein bands were visualized by Clarity western ECL substrate (Bio Rad cat. no. 170-5060).

[0183] Gel electrophoresis was done in a Mini-PROTEAN® Tetra Vertical system (Bio Rad cat. no. 1658004). Blotting was carried out in a Trans-Blot® Turbo™ Transfer System (Bio Rad cat. no. 1704150). Blots were develop using a ChemiDoc™ Imaging System (Bio Rad cat. no. 17001401)

[0184] Examples of PDL1 protein downregulation in GMS-10 cells are shown in FIG. 6A.

[0185] Example 10. Antisense-Mediated Knockdown of Immune Checkpoint-Encoding mRNAs in Cultured Cancer Cells Using Monospecific Antisense Oligonucleotides

[0186] Human glioblastoma cell line GMS-10 (DSMZ cat. no. ACC405) was purchased from Leibniz Institue DSMZ-German Collection of Microorganisms and Cell Cultures and maintained in 85-90% Dulbecco's MEM (Sigma cat. no. D6546), 10-15% fetal bovine serum (Sigma cat. no. F2442), 2 mM L-glutamine (Sigma cat. no. G7513), and penicillin/streptomycin (Sigma cat. no. P4333) in a humidified 5% CO2 incubator at 37° C. and passaged twice a week.

[0187] For transfection of the immune checkpoint antisense oligonucleotides CRM0185, CRM0187 and CRM0190 (SEQ ID Nos: 1597, 1653 and 1625 respectively) listed in Table 7.1, GMS-10 cells were seeded in 6-well cell culture plates and transfected using 5 μL/mL Lipofectamine 2000 (Thermo Fisher Scientific cat. no. 11668027) using antisense oligonucleotides at a final concentration of 25 nM. A scrambled oligonucleotide (CRM0023) and mock transfection were included as controls. Briefly, cells were seeded at 200.000 cells/well 24 hr before transfection. For transfections, cells were washed in Opti-Mem (Thermo Fisher Scientific cat. no. 51985-026) followed by 7-minute treatment with Lipofectamin in 900 μL Opti-Mem. Antisense oligonucleotides were added and cells incubated at 5% CO2 at 37° C. for 4 hours. Cells were washed once in Opti-Mem and 2.5mL Dulbecco's MEM was then added to cells.

[0188] 24 hours after transfection, total RNA was isolated from the cells using the RNeasy mini kit (Qiagen) according to the manufacturer's instructions and 1 μg total RNA was reverse transcribed into cDNA using the High Capacity cDNA reverse transcription kit (Life Technologies cat. no. 4374967) according to the protocol provided by the manufacturer.

[0189] Target mRNA levels were determined by quantitative PCR using Taqman Gene Expression Master Mix (ABI cat. no. 4369542) and pre-designed Taqman assays for PDL1 (CD274) (IDT cat. no. Hs.PT.58.4665575), PDL2 (PDCD1LG2) (IDT cat. no. Hs.PT.58.21416962), and IDO1 (IDT cat. no. Hs.PT.58.924731). Furthermore, the expression of TBP mRNA was measured (IDT cat. no. Hs.PT.58v.39858774) and used as an endogenous control in calculation of changes in expression of the target genes, using the ΔΔCt method with efficiency correction. Values were normalized to Mock.

[0190] Quantitative PCR was carried out on a Quantstudio 6 Flex Real-Time thermocycler (ABI)

[0191] Examples of PDL1, IDO1, and PDL2 mRNA knockdown in GMS-10 cells are shown in FIG. 7.

[0192] Example 11. Antisense-Mediated Downregulation of Immune Checkpoint Proteins in Cultured Cancer Cells Using Monospecific Antisense Oligonucleotides

[0193] GMS-10 cells were maintained and transfected with antisense oligonucleotides CRM0185, CRM0187, and CRM0190 as described in Example 10.

[0194] 48 hours after transfection total protein was isolated from the cells scraped from the well. Cells were lysed in RIPA buffer supplemented with complete proteinase inhibitor cocktail (Sigma cat. no. 000000011697498001). Cells were passed through a syringe ten times to ensure efficient lysis. Cell debris was removed by a ten-minute centrifugation at 8000×g.

[0195] Protein levels were assessed by western blotting. Protein samples were denatured in NuPAGE LDS sample buffer (Invitrogen cat. no. NP0007) with NuPAGE reducing agent (Invitrogen cat. no. NP0004). Proteins were separated on Mini-PROTEAN TGX gels (Bio Rad cat. no. 456,8123) in TGS running buffer (Bio Rad cat. no. 161-0732).

[0196] Proteins were transferred to a nitrocellulose membrane using Trans-Blot Turbo transfer packs (Bio Rad cat. no. 170-4159). Membranes were blocked in TBS-Tween (Thermo Scientific cat. no. 28360) supplemented with 5% skimmed milk powder (Sigma cat. no. 70166). Antibody incubation was performed in TBS tween with 5% skimmed milk powder. The following antibodies were used: PDL1 antibody (1:1000, Abcam cat. no. ab213524) and secondary anti-rabbit antibody (1:10000, Dako cat. no. P0448). Vinculin was used as loading control. The following antibodies were used: Vinculin antibody (1:2000, Sigma cat. no. V9131) and secondary anti-mouse antibody (1:10000, Dako cat. no. P0447). Protein bands were visualized by Clarity western ECL substrate (Bio Rad cat. no. 170-5060).

[0197] Gel electrophoresis was done in a Mini-PROTEAN® Tetra Vertical system (Bio Rad cat. no. 1658004). Blotting was carried out in a Trans-Blot® Turbo™ Transfer System (Bio Rad cat. no. 1704150). Blots were develop using a ChemiDoc™ Imaging System (Bio Rad cat. no. 17001401)

[0198] Examples of PDL1 protein downregulation in GMS-10 cells are shown in FIG. 6B.

[0199] Examples of IDO1 protein downregulation in GMS-10 cells are shown in FIG. 8

[0200] Example 12. Antisense-Mediated Knockdown of Immune Checkpoint mRNAs in Cultured Cancer Cells Using Unassisted Uptake of Monospecific Antisense Oligonucleotides.

[0201] GMS-10 cells were maintained as described in Example 10. For unassisted uptake of the immune checkpoint antisense oligonucleotides CRM0185, CRM0187, and CRM0190, GMS-10 cells were seeded in 6-well cell culture and stimulated with 20 ng/mL IFN-γ to upregulate the immune checkpoint genes. 24 hours post-seeding media was changed and 20 ng/mL IFN-γ and antisense oligonucleotides were added at a final concentration of 2.5 μM. A scrambled oligonucleotide (CRM0023) and a mock were included as controls. Briefly, cells were seeded in a concentration of 80.000 cells/well and incubated at 5% CO2 at 37° C. for 4 hours. 20 ng/mL IFN-γ was added. 24 hr post-seeding antisense oligonucleotides and IFN-γ were added to fresh media and added to cells.

[0202] 72 hours after antisense oligonucleotides were added, total RNA was isolated from the cells using the RNeasy mini kit (Qiagen) according to the manufacturer's instructions and 1 μg total RNA was reverse transcribed into cDNA using the High Capacity cDNA reverse transcription kit (Life Technologies cat. no. 4374967) according to the protocol provided by the manufacturer.

[0203] Target mRNA levels of PDL1, PDL2, IDO1, and TBP were determined by quantitative PCR as described in Example 10.

[0204] Examples of knockdown of PDL1, IDO, and PDL2 mRNAs in GMS-10 following unassisted uptake are shown in FIG. 9.

[0205] Example 13. Antisense-Mediated Downregulation of Immune Checkpoint Proteins in Cultured Cancer Cells Using Monospecific Antisense Oligonucleotides

[0206] Oligonucleotides CRM0185, CRM0187, and CRM0190 were delivered to GMS-10 cells by unassisted uptake, as described in Example 12.

[0207] 72 hours after antisense oligonucleotides were added total protein was isolated and analyzed by Western blot as described in Example 11.

[0208] Examples of IDO1 protein down-regulation in GMS-10 following unassisted delivery of oligonucleotides are shown in FIG. 10.

[0209] Example 14. Antisense-Mediated Knockdown of Immune Checkpoint mRNAs in Cultured Cancer Cells Using Bispecific Antisense Oligonucleotides

[0210] Bispecific antisense oligonucleotides CRM0193, CRM0196, and CRM0198 (SEQ.ID.NO 377, 382, and 1154, respectively) were transfected Lipofectamine 2000 into GMS-10 cells, and the effect on expression levels of PDL1, IDO1, and PDL2 mRNA was measured by qPCR using the methods described in Example 10.

[0211] Examples of knockdown of PDL1, IDO, and PDL2 mRNAs in GMS-10 cells following transfection of bispecific antisense oligonucleotides are shown in FIG. 5.

[0212] Example 15. Antisense-Mediated Downregulation of Immune Checkpoint Proteins in Cultured Cancer Cells Using Bispecific Antisense Oligonucleotides

[0213] The bispecific antisense oligonucleotides were transfected into GMS-10 cells as described in Example 14.

[0214] 48 hours after transfection, total protein was isolated and analyzed by western blot, as described in Example 11.

[0215] Examples of IDO1 protein downregulation using bispecific antisense oligonucleotides transfected into GMS-10 cells are shown in FIG. 11.

[0216] Example 16. Antisense-Mediated Knockdown of Immune Checkpoint mRNAs in Cultured Cancer Cells Using Antisense Oligonucleotides Targeting Both Human and Mouse Immune Checkpoint Proteins

[0217] Human glioblastoma cell line GMS-10 was maintained as described in Example 10. The murine glioblastoma cell line Neuro2a (N2a) was maintained in 85-90% Dulbecco's MEM (Sigma cat. no. D6546), 10-15% fetal bovine serum (Sigma cat. no. F2442), and penicillin/streptomycin (Sigma cat. no. P4333) in a humidified 5% CO2 incubator at 37° C. and passaged twice a week.

[0218] For transfection of the immune checkpoint-targeting antisense oligonucleotides CRM0129, CRM0131, CRM0134, CRM0135, CRM0138, and CRM0139 (SEQ.ID.NOs 1640, 1642, 1645, 1646, 1649, 1650) listed in Table 7.1, GMS-10 and N2A cells were seeded in 6-well cell culture plates and transfected using 5 μL/mL Lipofectamine 2000 (Thermo Fisher Scientific cat. no. 11668027) using antisense oligonucleotides at a 25 nM concentration. A scrambled oligonucleotide (CRM0023) and mock transfection were included as controls. Briefly, GMS-10 and N2A cells were seeded in a concentration of 120.000 and 250.000 cells/well, respectively, 24 hr before transfection. At transfections, cells were washed in Opti-Mem (Thermo Fisher Scientific cat. no. 51985-026) followed by 7-minute treatment of Lipofectamin in 900 μL Opti-Mem. Antisense oligo was added and cells incubated at 5% CO2 at 37° C. for 4 hours. Cells were washed once in Opti-Mem and 2.5 mL Dulbecco's MEM was then added to cells.

[0219] 48 hours after transfection, total RNA was isolated from the cells using the RNeasy mini kit (Qiagen) according to the manufacturer's instructions and 1 μg total RNA was reverse transcribed into cDNA using the High Capacity cDNA reverse transcription kit (Life Technologies cat. no. 4374967) according to the protocol provided by the manufacturer.

[0220] Target mRNA levels were determined by quantitative PCR using Taqman Gene Expression Master Mix (ABI cat. no. 4369542) and pre-designed Taqman assays for PDL1 (CD274) (IDT cat. no. Hs.PT.58.4665575), PDL2 (PDCD1LG2) (IDT cat. no. Hs.PT.58.21416962), and IDO (IDT cat. no. Hs.PT.58.924731). Furthermore the expression of TBP mRNA was measured (IDT cat. no. Hs.PT.58v.39858774) and used as an endogenous control in calculation of expression changes using the ΔΔCt method with efficiency correction. Values were normalized to Scr-CRM0023.

[0221] Target mRNA levels in murine Neuro2a cells were determined by quantitative PCR using pre-designed Taqman assays for PDL1 (CD274) (IDT cat. no. Mm.PT.58.11921659), PDL2 (PDCD1LG2) (IDT cat. no. Mm.PT.58.11776803), and IDO (IDT cat. no. Mm.PT.58.29540170). Furthermore the expression of TBP mRNA was measured (IDT cat. no. mm.PT.39a.22214839) and used as an endogenous control in calculation of expression changes using the ΔΔCt method with efficiency correction. Values were normalized to Scr-CRM0023.

[0222] Quantitative PCR was carried out on a Quantstudio 6 Flex Real-Time thermocycler (ABI).

[0223] Examples of inhibition of PDL1, IDO, and PDL2 mRNAs in GMS-10 cells are shown in FIG. 12. Example of inhibition of PDL1 in Neuro-2a cells is shown in FIG. 13.

[0224] Example 17. Antisense-Mediated Downregulation of Immune Checkpoint Proteins in Cultured Cancer Cells Using Antisense Oligonucleotides Targeting Both Human and Mouse Immune Checkpoint Proteins

[0225] The antisense oligonucleotides CRM0129, CRM0131, CRM0134, CRM0135, CRM0138, and CRM0139 (SEQ.ID.NOs 1640, 1642, 1645, 1646, 1649, 1650) were transfected into GSM-10 cells and analysis of IDO1 protein levels were carried out as described in Examples 10 and 11.

[0226] Examples of IDO1 protein downregulation in GMS-10 cells are shown in FIG. 14.

The application's sequence listing, which the Patent Office published only in electronic form, follows.

SEQUENCE LISTING (3133 sequences)

SEQ ID NO: 1 - RNA, 14 nt, Homo Sapiens
aucagucauaaucu

SEQ ID NO: 2 - RNA, 14 nt, Homo Sapiens
cauucuccugaccc

SEQ ID NO: 3 - RNA, 15 nt, Homo Sapiens
uccaugccuucuuug

SEQ ID NO: 4 - RNA, 14 nt, Homo Sapiens
gauaaaaaguguca

SEQ ID NO: 5 - RNA, 14 nt, Homo Sapiens
agaggauaugaagc

SEQ ID NO: 6 - RNA, 14 nt, Homo Sapiens
aggaacugaucuuc

SEQ ID NO: 7 - RNA, 14 nt, Homo Sapiens
caggcuccuaggaa

SEQ ID NO: 8 - RNA, 14 nt, Homo Sapiens
gagaguucuucucu

SEQ ID NO: 9 - RNA, 14 nt, Homo Sapiens
gcccaagcccuucu

SEQ ID NO: 10 - RNA, 15 nt, Homo Sapiens
ggcccaagcccuucu

SEQ ID NO: 11 - RNA, 14 nt, Homo Sapiens
gggcccaagcccuu

SEQ ID NO: 12 - RNA, 15 nt, Homo Sapiens
gggcccaagcccuuc

SEQ ID NO: 13 - RNA, 16 nt, Homo Sapiens
gggcccaagcccuucu

SEQ ID NO: 14 - RNA, 15 nt, Homo Sapiens
uugccucuggccagc

SEQ ID NO: 15 - RNA, 14 nt, Homo Sapiens
aagguuuauaaucc

SEQ ID NO: 16 - RNA, 15 nt, Homo Sapiens
guaagguuuauaauc

SEQ ID NO: 17 - RNA, 16 nt, Homo Sapiens
guaagguuuauaaucc

SEQ ID NO: 18 - RNA, 14 nt, Homo Sapiens
uaagguuuauaauc

SEQ ID NO: 19 - RNA, 15 nt, Homo Sapiens
uaagguuuauaaucc

SEQ ID NO: 20 - RNA, 15 nt, Homo Sapiens
cccucccaggaccuu

SEQ ID NO: 21 - RNA, 15 nt, Homo Sapiens
cugcagccucugaaa

SEQ ID NO: 22 - RNA, 15 nt, Homo Sapiens
cuucacugggguuuu

SEQ ID NO: 23 - RNA, 16 nt, Homo Sapiens
cuucacugggguuuug

SEQ ID NO: 24 - RNA, 14 nt, Homo Sapiens
gcuucacugggguu

SEQ ID NO: 25 - RNA, 15 nt, Homo Sapiens
gcuucacugggguuu

SEQ ID NO: 26 - RNA, 16 nt, Homo Sapiens
gcuucacugggguuuu

SEQ ID NO: 27 - RNA, 17 nt, Homo Sapiens
gcuucacugggguuuug

SEQ ID NO: 28 - RNA, 14 nt, Homo Sapiens
ggcuucacuggggu

SEQ ID NO: 29 - RNA, 15 nt, Homo Sapiens
ggcuucacugggguu

SEQ ID NO: 30 - RNA, 16 nt, Homo Sapiens
ggcuucacugggguuu

SEQ ID NO: 31 - RNA, 17 nt, Homo Sapiens
ggcuucacugggguuuu

SEQ ID NO: 32 - RNA, 18 nt, Homo Sapiens
ggcuucacugggguuuug

SEQ ID NO: 33 - RNA, 15 nt, Homo Sapiens
gggucagggaaagag

SEQ ID NO: 34 - RNA, 14 nt, Homo Sapiens
uagaaucugcuccu

SEQ ID NO: 35 - RNA, 14 nt, Homo Sapiens
uccuugacugggua

SEQ ID NO: 36 - RNA, 15 nt, Homo Sapiens
uucacugggguuuug

SEQ ID NO: 37 - RNA, 14 nt, Homo Sapiens
caaccagguuugag

SEQ ID NO: 38 - RNA, 14 nt, Homo Sapiens
ugacauucaucuuc

SEQ ID NO: 39 - RNA, 14 nt, Homo Sapiens
uggguaacuaaaug

SEQ ID NO: 40 - RNA, 14 nt, Homo Sapiens
uuggguaacuaaau

SEQ ID NO: 41 - RNA, 15 nt, Homo Sapiens
uuggguaacuaaaug

SEQ ID NO: 42 - RNA, 14 nt, Homo Sapiens
aaccaagcaagagc

SEQ ID NO: 43 - RNA, 15 nt, Homo Sapiens
aaccaagcaagagca

SEQ ID NO: 44 - RNA, 14 nt, Homo Sapiens
accaagcaagagca

SEQ ID NO: 45 - RNA, 14 nt, Homo Sapiens
aguaacugaugaug

SEQ ID NO: 46 - RNA, 15 nt, Homo Sapiens
cacuuugaguuucag

SEQ ID NO: 47 - RNA, 16 nt, Homo Sapiens
cacuuugaguuucagu

SEQ ID NO: 48 - RNA, 14 nt, Homo Sapiens
cagaucaccuuaga

SEQ ID NO: 49 - RNA, 20 nt, Homo Sapiens
ccucagaaaauuaaaaauag

SEQ ID NO: 50 - RNA, 15 nt, Homo Sapiens
gauggagaaaugaac

SEQ ID NO: 51 - RNA, 14 nt, Homo Sapiens
gcuuuacccaggag

SEQ ID NO: 52 - RNA, 15 nt, Homo Sapiens
ggauggagaaaugaa

SEQ ID NO: 53 - RNA, 16 nt, Homo Sapiens
ggauggagaaaugaac

SEQ ID NO: 54 - RNA, 14 nt, Homo Sapiens
ggcuuuacccagga

SEQ ID NO: 55 - RNA, 15 nt, Homo Sapiens
ggcuuuacccaggag

SEQ ID NO: 56 - RNA, 20 nt, Homo Sapiens
guuccucagaaaauuaaaaa

SEQ ID NO: 57 - RNA, 15 nt, Homo Sapiens
guucuguuugccucu

SEQ ID NO: 58 - RNA, 20 nt, Homo Sapiens
ucagaaaauuaaaaauagaa

SEQ ID NO: 59 - RNA, 15 nt, Homo Sapiens
uguucuguuugccuc

SEQ ID NO: 60 - RNA, 16 nt, Homo Sapiens
uguucuguuugccucu

SEQ ID NO: 61 - RNA, 14 nt, Homo Sapiens
cucuaaucuagcag

SEQ ID NO: 62 - RNA, 14 nt, Homo Sapiens
aaaucucagcuaag

SEQ ID NO: 63 - RNA, 14 nt, Homo Sapiens
agguauuuaauugg

SEQ ID NO: 64 - RNA, 14 nt, Homo Sapiens
cagguauuuaauug

SEQ ID NO: 65 - RNA, 15 nt, Homo Sapiens
cagguauuuaauugg

SEQ ID NO: 66 - RNA, 14 nt, Homo Sapiens
cuuuuguaaccacc

SEQ ID NO: 67 - RNA, 17 nt, Homo Sapiens
uuaaaaauacaagaaau

SEQ ID NO: 68 - RNA, 18 nt, Homo Sapiens
uuaaaaauacaagaaauu

SEQ ID NO: 69 - RNA, 14 nt, Homo Sapiens
aaagagccucucaa

SEQ ID NO: 70 - RNA, 17 nt, Homo Sapiens
aaaggaaggaaauccua

SEQ ID NO: 71 - RNA, 18 nt, Homo Sapiens
aaaggaaggaaauccuau

SEQ ID NO: 72 - RNA, 19 nt, Homo Sapiens
aaaggaaggaaauccuauc

SEQ ID NO: 73 - RNA, 20 nt, Homo Sapiens
aaaggaaggaaauccuauca

SEQ ID NO: 74 - RNA, 15 nt, Homo Sapiens
aaauccuaucauaug

SEQ ID NO: 75 - RNA, 16 nt, Homo Sapiens
aaauccuaucauaugc

SEQ ID NO: 76 - RNA, 17 nt, Homo Sapiens
aaauccuaucauaugcu

SEQ ID NO: 77 - RNA, 18 nt, Homo Sapiens
aaauccuaucauaugcua

SEQ ID NO: 78 - RNA, 17 nt, Homo Sapiens
aaggaaauccuaucaua

SEQ ID NO: 79 - RNA, 18 nt, Homo Sapiens
aaggaaauccuaucauau

SEQ ID NO: 80 - RNA, 19 nt, Homo Sapiens
aaggaaauccuaucauaug

SEQ ID NO: 81 - RNA, 20 nt, Homo Sapiens
aaggaaauccuaucauaugc

SEQ ID NO: 82 - RNA, 16 nt, Homo Sapiens
aaggaaggaaauccua

SEQ ID NO: 83 - RNA, 17 nt, Homo Sapiens
aaggaaggaaauccuau

SEQ ID NO: 84 - RNA, 18 nt, Homo Sapiens
aaggaaggaaauccuauc

SEQ ID NO: 85 - RNA, 19 nt, Homo Sapiens
aaggaaggaaauccuauca

SEQ ID NO: 86 - RNA, 20 nt, Homo Sapiens
aaggaaggaaauccuaucau

SEQ ID NO: 87 - RNA, 15 nt, Homo Sapiens
aauccuaucauaugc

SEQ ID NO: 88 - RNA, 16 nt, Homo Sapiens
aauccuaucauaugcu

SEQ ID NO: 89 - RNA, 17 nt, Homo Sapiens
aauccuaucauaugcua

SEQ ID NO: 90 - RNA, 19 nt, Homo Sapiens
agaguuucagauuugcaaa

SEQ ID NO: 91 - RNA, 20 nt, Homo Sapiens
agaguuucagauuugcaaaa

SEQ ID NO: 92 - RNA, 16 nt, Homo Sapiens
agauuugcaaaaugaa

SEQ ID NO: 93 - RNA, 17 nt, Homo Sapiens
agauuugcaaaaugaaa

SEQ ID NO: 94 - RNA, 18 nt, Homo Sapiens
agauuugcaaaaugaaaa

SEQ ID NO: 95 - RNA, 16 nt, Homo Sapiens
aggaaauccuaucaua

SEQ ID NO: 96 - RNA, 17 nt, Homo Sapiens
aggaaauccuaucauau

SEQ ID NO: 97 - RNA, 18 nt, Homo Sapiens
aggaaauccuaucauaug

SEQ ID NO: 98 - RNA, 19 nt, Homo Sapiens
aggaaauccuaucauaugc

SEQ ID NO: 99 - RNA, 20 nt, Homo Sapiens
aggaaauccuaucauaugcu

SEQ ID NO: 100 - RNA, 15 nt, Homo Sapiens
aggaaggaaauccua

SEQ ID NO: 101 - RNA, 16 nt, Homo Sapiens
aggaaggaaauccuau

SEQ ID NO: 102 - RNA, 17 nt, Homo Sapiens
aggaaggaaauccuauc

SEQ ID NO: 103 - RNA, 18 nt, Homo Sapiens
aggaaggaaauccuauca

SEQ ID NO: 104 - RNA, 19 nt, Homo Sapiens
aggaaggaaauccuaucau

SEQ ID NO: 105 - RNA, 20 nt, Homo Sapiens
aggaaggaaauccuaucaua

SEQ ID NO: 106 - RNA, 17 nt, Homo Sapiens
aguuucagauuugcaaa

SEQ ID NO: 107 - RNA, 18 nt, Homo Sapiens
aguuucagauuugcaaaa

SEQ ID NO: 108 - RNA, 19 nt, Homo Sapiens
aguuucagauuugcaaaau

SEQ ID NO: 109 - RNA, 20 nt, Homo Sapiens
aguuucagauuugcaaaaug

SEQ ID NO: 110 - RNA, 16 nt, Homo Sapiens
auagaguuucagauuu

SEQ ID NO: 111 - RNA, 17 nt, Homo Sapiens
auagaguuucagauuug

SEQ ID NO: 112 - RNA, 18 nt, Homo Sapiens
auagaguuucagauuugc

SEQ ID NO: 113 - RNA, 19 nt, Homo Sapiens
auagaguuucagauuugca

SEQ ID NO: 114 - RNA, 20 nt, Homo Sapiens
auagaguuucagauuugcaa

SEQ ID NO: 115 - RNA, 14 nt, Homo Sapiens
auccuaucauaugc

SEQ ID NO: 116 - RNA, 15 nt, Homo Sapiens
auccuaucauaugcu

SEQ ID NO: 117 - RNA, 16 nt, Homo Sapiens
auccuaucauaugcua

SEQ ID NO: 118 - RNA, 15 nt, Homo Sapiens
cagauuugcaaaaug

SEQ ID NO: 119 - RNA, 16 nt, Homo Sapiens
cagauuugcaaaauga

SEQ ID NO: 120 - RNA, 17 nt, Homo Sapiens
cagauuugcaaaaugaa

SEQ ID NO: 121 - RNA, 18 nt, Homo Sapiens
cagauuugcaaaaugaaa

SEQ ID NO: 122 - RNA, 19 nt, Homo Sapiens
cagauuugcaaaaugaaaa

SEQ ID NO: 123 - RNA, 15 nt, Homo Sapiens
cagugaacaaaggag

SEQ ID NO: 124 - RNA, 14 nt, Homo Sapiens
ccuaucauaugcua

SEQ ID NO: 125 - RNA, 14 nt, Homo Sapiens
cuaagaagcaccua

SEQ ID NO: 126 - RNA, 16 nt, Homo Sapiens
cuuuuuaaacaaacaa

SEQ ID NO: 127 - RNA, 15 nt, Homo Sapiens
gaaauccuaucauau

SEQ ID NO: 128 - RNA, 16 nt, Homo Sapiens
gaaauccuaucauaug

SEQ ID NO: 129 - RNA, 17 nt, Homo Sapiens
gaaauccuaucauaugc

SEQ ID NO: 130 - RNA, 18 nt, Homo Sapiens
gaaauccuaucauaugcu

SEQ ID NO: 131 - RNA, 19 nt, Homo Sapiens
gaaauccuaucauaugcua

SEQ ID NO: 132 - RNA, 17 nt, Homo Sapiens
gaaggaaauccuaucau

SEQ ID NO: 133 - RNA, 18 nt, Homo Sapiens
gaaggaaauccuaucaua

SEQ ID NO: 134 - RNA, 19 nt, Homo Sapiens
gaaggaaauccuaucauau

SEQ ID NO: 135 - RNA, 20 nt, Homo Sapiens
gaaggaaauccuaucauaug

SEQ ID NO: 136 - RNA, 18 nt, Homo Sapiens
gaguuucagauuugcaaa

SEQ ID NO: 137 - RNA, 19 nt, Homo Sapiens
gaguuucagauuugcaaaa

SEQ ID NO: 138 - RNA, 20 nt, Homo Sapiens
gaguuucagauuugcaaaau

SEQ ID NO: 139 - RNA, 16 nt, Homo Sapiens
gauuugcaaaaugaaa

SEQ ID NO: 140 - RNA, 17 nt, Homo Sapiens
gauuugcaaaaugaaaa

SEQ ID NO: 141 - RNA, 15 nt, Homo Sapiens
gcagugaacaaagga

SEQ ID NO: 142 - RNA, 16 nt, Homo Sapiens
gcagugaacaaaggag

SEQ ID NO: 143 - RNA, 15 nt, Homo Sapiens
ggaaauccuaucaua

SEQ ID NO: 144 - RNA, 16 nt, Homo Sapiens
ggaaauccuaucauau

SEQ ID NO: 145 - RNA, 17 nt, Homo Sapiens
ggaaauccuaucauaug

SEQ ID NO: 146 - RNA, 18 nt, Homo Sapiens
ggaaauccuaucauaugc

SEQ ID NO: 147 - RNA, 19 nt, Homo Sapiens
ggaaauccuaucauaugcu

SEQ ID NO: 148 - RNA, 20 nt, Homo Sapiens
ggaaauccuaucauaugcua

SEQ ID NO: 149 - RNA, 15 nt, Homo Sapiens
ggaaggaaauccuau

SEQ ID NO: 150 - RNA, 16 nt, Homo Sapiens
ggaaggaaauccuauc

SEQ ID NO: 151 - RNA, 17 nt, Homo Sapiens
ggaaggaaauccuauca

SEQ ID NO: 152 - RNA, 18 nt, Homo Sapiens
ggaaggaaauccuaucau

SEQ ID NO: 153 - RNA, 19 nt, Homo Sapiens
ggaaggaaauccuaucaua

SEQ ID NO: 154 - RNA, 20 nt, Homo Sapiens
ggaaggaaauccuaucauau

SEQ ID NO: 155 - RNA, 16 nt, Homo Sapiens
guuucagauuugcaaa

SEQ ID NO: 156 - RNA, 17 nt, Homo Sapiens
guuucagauuugcaaaa

SEQ ID NO: 157 - RNA, 18 nt, Homo Sapiens
guuucagauuugcaaaau

SEQ ID NO: 158 - RNA, 19 nt, Homo Sapiens
guuucagauuugcaaaaug

SEQ ID NO: 159 - RNA, 20 nt, Homo Sapiens
guuucagauuugcaaaauga

SEQ ID NO: 160 - RNA, 16 nt, Homo Sapiens
uagaguuucagauuug

SEQ ID NO: 161 - RNA, 17 nt, Homo Sapiens
uagaguuucagauuugc

SEQ ID NO: 162 - RNA, 18 nt, Homo Sapiens
uagaguuucagauuugca

SEQ ID NO: 163 - RNA, 19 nt, Homo Sapiens
uagaguuucagauuugcaa

SEQ ID NO: 164 - RNA, 20 nt, Homo Sapiens
uagaguuucagauuugcaaa

SEQ ID NO: 165 - RNA, 16 nt, Homo Sapiens
ucagauuugcaaaaug

SEQ ID NO: 166 - RNA, 17 nt, Homo Sapiens
ucagauuugcaaaauga

SEQ ID NO: 167 - RNA, 18 nt, Homo Sapiens
ucagauuugcaaaaugaa

SEQ ID NO: 168 - RNA, 19 nt, Homo Sapiens
ucagauuugcaaaaugaaa

SEQ ID NO: 169 - RNA, 20 nt, Homo Sapiens
ucagauuugcaaaaugaaaa

SEQ ID NO: 170 - RNA, 14 nt, Homo Sapiens
uccuaucauaugcu

SEQ ID NO: 171 - RNA, 15 nt, Homo Sapiens
uccuaucauaugcua

SEQ ID NO: 172 - RNA, 15 nt, Homo Sapiens
uucagauuugcaaaa

SEQ ID NO: 173 - RNA, 16 nt, Homo Sapiens
uucagauuugcaaaau

SEQ ID NO: 174 - RNA, 17 nt, Homo Sapiens
uucagauuugcaaaaug

SEQ ID NO: 175 - RNA, 18 nt, Homo Sapiens
uucagauuugcaaaauga

SEQ ID NO: 176 - RNA, 19 nt, Homo Sapiens
uucagauuugcaaaaugaa

SEQ ID NO: 177 - RNA, 20 nt, Homo Sapiens
uucagauuugcaaaaugaaa

SEQ ID NO: 178 - RNA, 16 nt, Homo Sapiens
uuucagauuugcaaaa

SEQ ID NO: 179 - RNA, 17 nt, Homo Sapiens
uuucagauuugcaaaau

SEQ ID NO: 180 - RNA, 18 nt, Homo Sapiens
uuucagauuugcaaaaug

SEQ ID NO: 181 - RNA, 19 nt, Homo Sapiens
uuucagauuugcaaaauga

SEQ ID NO: 182 - RNA, 20 nt, Homo Sapiens
uuucagauuugcaaaaugaa

SEQ ID NO: 183 - RNA, 14 nt, Homo Sapiens
gugugaauuacagg

SEQ ID NO: 184 - RNA, 15 nt, Homo Sapiens
guuuuccauaauuag

SEQ ID NO: 185 - RNA, 16 nt, Homo Sapiens
guuuuccauaauuagg

SEQ ID NO: 186 - RNA, 15 nt, Homo Sapiens
ugugugaauuacagg

SEQ ID NO: 187 - RNA, 16 nt, Homo Sapiens
uguuuuccauaauuag

SEQ ID NO: 188 - RNA, 17 nt, Homo Sapiens
uguuuuccauaauuagg

SEQ ID NO: 189 - RNA, 16 nt, Homo Sapiens
uuuucauuuacaaaga

SEQ ID NO: 190 - RNA, 15 nt, Homo Sapiens
uuuuccauaauuagg

SEQ ID NO: 191 - RNA, 14 nt, Homo Sapiens
agugggaagccaaa

SEQ ID NO: 192 - RNA, 15 nt, Homo Sapiens
agugggaagccaaau

SEQ ID NO: 193 - RNA, 15 nt, Homo Sapiens
cagugggaagccaaa

SEQ ID NO: 194 - RNA, 16 nt, Homo Sapiens
cagugggaagccaaau

SEQ ID NO: 195 - RNA, 14 nt, Homo Sapiens
gugggaagccaaau

SEQ ID NO: 196 - RNA, 17 nt, Homo Sapiens
aagagaaggagaagaga

SEQ ID NO: 197 - RNA, 14 nt, Homo Sapiens
cagacagucaucca

SEQ ID NO: 198 - RNA, 17 nt, Homo Sapiens
gaagagaaggagaagag

SEQ ID NO: 199 - RNA, 18 nt, Homo Sapiens
gaagagaaggagaagaga

SEQ ID NO: 200 - RNA, 14 nt, Homo Sapiens
ccaguuccaaaccc

SEQ ID NO: 201 - RNA, 14 nt, Homo Sapiens
cucucaucaaccca

SEQ ID NO: 202 - RNA, 14 nt, Homo Sapiens
cucucucaucaacc

SEQ ID NO: 203 - RNA, 15 nt, Homo Sapiens
cucucucaucaaccc

SEQ ID NO: 204 - RNA, 16 nt, Homo Sapiens
cucucucaucaaccca

SEQ ID NO: 205 - RNA, 15 nt, Homo Sapiens
gcccaggccugagac

SEQ ID NO: 206 - RNA, 14 nt, Homo Sapiens
ggagauucugggca

SEQ ID NO: 207 - RNA, 14 nt, Homo Sapiens
ucucucaucaaccc

SEQ ID NO: 208 - RNA, 15 nt, Homo Sapiens
ucucucaucaaccca

SEQ ID NO: 209 - RNA, 15 nt, Homo Sapiens
agacacugggagagg

SEQ ID NO: 210 - RNA, 14 nt, Homo Sapiens
caaccuucagaaag

SEQ ID NO: 211 - RNA, 14 nt, Homo Sapiens
ccauggaagggccc

SEQ ID NO: 212 - RNA, 20 nt, Homo Sapiens
cuucuuugagccucaguuuc

SEQ ID NO: 213 - RNA, 15 nt, Homo Sapiens
cuuuuaucugcccag

SEQ ID NO: 214 - RNA, 15 nt, Homo Sapiens
ggauggauggaaaaa

SEQ ID NO: 215 - RNA, 15 nt, Homo Sapiens
uagacacugggagag

SEQ ID NO: 216 - RNA, 16 nt, Homo Sapiens
uagacacugggagagg

SEQ ID NO: 217 - RNA, 14 nt, Homo Sapiens
uucuuagcuccuga

SEQ ID NO: 218 - RNA, 14 nt, Homo Sapiens
agccgucaccucuu

SEQ ID NO: 219 - RNA, 15 nt, Homo Sapiens
agccgucaccucuug

SEQ ID NO: 220 - RNA, 14 nt, Homo Sapiens
cagccgucaccucu

SEQ ID NO: 221 - RNA, 15 nt, Homo Sapiens
cagccgucaccucuu

SEQ ID NO: 222 - RNA, 16 nt, Homo Sapiens
cagccgucaccucuug

SEQ ID NO: 223 - RNA, 14 nt, Homo Sapiens
ccagccgucaccuc

SEQ ID NO: 224 - RNA, 15 nt, Homo Sapiens
ccagccgucaccucu

SEQ ID NO: 225 - RNA, 16 nt, Homo Sapiens
ccagccgucaccucuu

SEQ ID NO: 226 - RNA, 17 nt, Homo Sapiens
ccagccgucaccucuug

SEQ ID NO: 227 - RNA, 14 nt, Homo Sapiens
gccgucaccucuug

SEQ ID NO: 228 - RNA, 14 nt, Homo Sapiens
ugaugaagcccugg

SEQ ID NO: 229 - RNA, 14 nt, Homo Sapiens
cacacuacugugua

SEQ ID NO: 230 - RNA, 14 nt, Homo Sapiens
gaugggcauggcuc

SEQ ID NO: 231 - RNA, 15 nt, Homo Sapiens
gaugggcauggcucc

SEQ ID NO: 232 - RNA, 14 nt, Homo Sapiens
gcaguccaaagaug

SEQ ID NO: 233 - RNA, 14 nt, Homo Sapiens
gccaggauagagau

SEQ ID NO: 234 - RNA, 15 nt, Homo Sapiens
ggaugggcauggcuc

SEQ ID NO: 235 - RNA, 16 nt, Homo Sapiens
ggaugggcauggcucc

SEQ ID NO: 236 - RNA, 15 nt, Homo Sapiens
ucuucuccuaacucu

SEQ ID NO: 237 - RNA, 14 nt, Homo Sapiens
uuagcagccagauc

SEQ ID NO: 238 - RNA, 15 nt, Homo Sapiens
uugguuuacaaaugc

SEQ ID NO: 239 - RNA, 14 nt, Homo Sapiens
uuuugccaagucuc

SEQ ID NO: 240 - RNA, 14 nt, Homo Sapiens
cuuccguauuccuc

SEQ ID NO: 241 - RNA, 15 nt, Homo Sapiens
cuuccguauuccuca

SEQ ID NO: 242 - RNA, 14 nt, Homo Sapiens
gaauuggaucaugg

SEQ ID NO: 243 - RNA, 14 nt, Homo Sapiens
uuccguauuccuca

SEQ ID NO: 244 - RNA, 14 nt, Homo Sapiens
aucacagguguugg

SEQ ID NO: 245 - RNA, 15 nt, Homo Sapiens
aucacagguguuggu

SEQ ID NO: 246 - RNA, 16 nt, Homo Sapiens
aucacagguguuggua

SEQ ID NO: 247 - RNA, 14 nt, Homo Sapiens
cacagguguuggua

SEQ ID NO: 248 - RNA, 15 nt, Homo Sapiens
ucacagguguuggua

SEQ ID NO: 249 - RNA, 14 nt, Homo Sapiens
uagagcccuagagu

SEQ ID NO: 250 - RNA, 15 nt, Homo Sapiens
aaaagauguuguguc

SEQ ID NO: 251 - RNA, 14 nt, Homo Sapiens
aaagauguuguguc

SEQ ID NO: 252 - RNA, 14 nt, Homo Sapiens
uguccugcuucuaa

SEQ ID NO: 253 - RNA, 15 nt, Homo Sapiens
uguccugcuucuaaa

SEQ ID NO: 254 - RNA, 15 nt, Homo Sapiens
ccagccacaaggcug

SEQ ID NO: 255 - RNA, 15 nt, Homo Sapiens
caagagcaggcaggg

SEQ ID NO: 256 - RNA, 15 nt, Homo Sapiens
gcaagagcaggcagg

SEQ ID NO: 257 - RNA, 16 nt, Homo Sapiens
gcaagagcaggcaggg

SEQ ID NO: 258 - RNA, 15 nt, Homo Sapiens
gcaggugagggaacu

SEQ ID NO: 259 - RNA, 14 nt, Homo Sapiens
aacaucagcguggg

SEQ ID NO: 260 - RNA, 15 nt, Homo Sapiens
uuguucauuggcuua

SEQ ID NO: 261 - RNA, 15 nt, Homo Sapiens
uccuuccuggguggg

SEQ ID NO: 262 - RNA, 14 nt, Homo Sapiens
caccaguguucugc

SEQ ID NO: 263 - RNA, 14 nt, Homo Sapiens
ggaaaaggguugag

SEQ ID NO: 264 - RNA, 14 nt, Homo Sapiens
aggcccuuuguggg

SEQ ID NO: 265 - RNA, 14 nt, Homo Sapiens
caggcccuuugugg

SEQ ID NO: 266 - RNA, 15 nt, Homo Sapiens
caggcccuuuguggg

SEQ ID NO: 267 - RNA, 15 nt, Homo Sapiens
cucugaagcaucuuu

SEQ ID NO: 268 - RNA, 14 nt, Homo Sapiens
cugugaagcgcuug

SEQ ID NO: 269 - RNA, 15 nt, Homo Sapiens
acagggagccugccc

SEQ ID NO: 270 - RNA, 16 nt, Homo Sapiens
cugggggcagggccug

SEQ ID NO: 271 - RNA, 15 nt, Homo Sapiens
gggccagcucugugg

SEQ ID NO: 272 - RNA, 16 nt, Homo Sapiens
gggccagcucuguggg

SEQ ID NO: 273 - RNA, 14 nt, Homo Sapiens
aucaaguccugagu

SEQ ID NO: 274 - RNA, 15 nt, Homo Sapiens
aucaaguccugagug

SEQ ID NO: 275 - RNA, 15 nt, Homo Sapiens
caucaaguccugagu

SEQ ID NO: 276 - RNA, 16 nt, Homo Sapiens
caucaaguccugagug

SEQ ID NO: 277 - RNA, 15 nt, Homo Sapiens
ccaucaaguccugag

SEQ ID NO: 278 - RNA, 16 nt, Homo Sapiens
ccaucaaguccugagu

SEQ ID NO: 279 - RNA, 17 nt, Homo Sapiens
ccaucaaguccugagug

SEQ ID NO: 280 - RNA, 14 nt, Homo Sapiens
ucaaguccugagug

SEQ ID NO: 281 - RNA, 15 nt, Homo Sapiens
cucuucugaaaaugc

SEQ ID NO: 282 - RNA, 16 nt, Homo Sapiens
cucuucugaaaaugca

SEQ ID NO: 283 - RNA, 17 nt, Homo Sapiens
cucuucugaaaaugcaa

SEQ ID NO: 284 - RNA, 18 nt, Homo Sapiens
cucuucugaaaaugcaaa

SEQ ID NO: 285 - RNA, 15 nt, Homo Sapiens
cuucugaaaaugcaa

SEQ ID NO: 286 - RNA, 16 nt, Homo Sapiens
cuucugaaaaugcaaa

SEQ ID NO: 287 - RNA, 14 nt, Homo Sapiens
guuuccagacaggu

SEQ ID NO: 288 - RNA, 16 nt, Homo Sapiens
ucuucugaaaaugcaa

SEQ ID NO: 289 - RNA, 17 nt, Homo Sapiens
ucuucugaaaaugcaaa

SEQ ID NO: 290 - RNA, 15 nt, Homo Sapiens
uucucauagccaucc

SEQ ID NO: 291 - RNA, 15 nt, Homo Sapiens
acuccuggguggcag

SEQ ID NO: 292 - RNA, 14 nt, Homo Sapiens
aggccaaugaggca

SEQ ID NO: 293 - RNA, 15 nt, Homo Sapiens
aggccaaugaggcag

SEQ ID NO: 294 - RNA, 16 nt, Homo Sapiens
aggccaaugaggcagu

SEQ ID NO: 295 - RNA, 14 nt, Homo Sapiens
ccaacaucuaaaag

SEQ ID NO: 296 - RNA, 14 nt, Homo Sapiens
gccaaugaggcagu

SEQ ID NO: 297 - RNA, 15 nt, Homo Sapiens
ggccaaugaggcagu

SEQ ID NO: 298 - RNA, 16 nt, Homo Sapiens
aaacaaaaagaagcca

SEQ ID NO: 299 - RNA, 15 nt, Homo Sapiens
aagguuuccagacag

SEQ ID NO: 300 - RNA, 16 nt, Homo Sapiens
aagguuuccagacagg

SEQ ID NO: 301 - RNA, 15 nt, Homo Sapiens
acauucugccucaga

SEQ ID NO: 302 - RNA, 14 nt, Homo Sapiens
acguauacaccaua

SEQ ID NO: 303 - RNA, 15 nt, Homo Sapiens
acguauacaccauag

SEQ ID NO: 304 - RNA, 16 nt, Homo Sapiens
acguauacaccauaga

SEQ ID NO: 305 - RNA, 17 nt, Homo Sapiens
acguauacaccauagaa

SEQ ID NO: 306 - RNA, 18 nt, Homo Sapiens
acguauacaccauagaau

SEQ ID NO: 307 - RNA, 19 nt, Homo Sapiens
acguauacaccauagaaua

SEQ ID NO: 308 - RNA, 20 nt, Homo Sapiens
acguauacaccauagaauac

SEQ ID NO: 309 - RNA, 14 nt, Homo Sapiens
acugaucuggacuc

SEQ ID NO: 310 - RNA, 15 nt, Homo Sapiens
acugaucuggacuca

SEQ ID NO: 311 - RNA, 15 nt, Homo Sapiens
agaaauaacuuccuu

SEQ ID NO: 312 - RNA, 15 nt, Homo Sapiens
aggauuucaaaaauc

SEQ ID NO: 313 - RNA, 14 nt, Homo Sapiens
aggguccacuguug

SEQ ID NO: 314 - RNA, 15 nt, Homo Sapiens
agguuuccagacagg

SEQ ID NO: 315 - RNA, 14 nt, Homo Sapiens
aguccucagaggca

SEQ ID NO: 316 - RNA, 14 nt, Homo Sapiens
auccaaaacuaccc

SEQ ID NO: 317 - RNA, 15 nt, Homo Sapiens
cacguauacaccaua

SEQ ID NO: 318 - RNA, 16 nt, Homo Sapiens
cacguauacaccauag

SEQ ID NO: 319 - RNA, 17 nt, Homo Sapiens
cacguauacaccauaga

SEQ ID NO: 320 - RNA, 18 nt, Homo Sapiens
cacguauacaccauagaa

SEQ ID NO: 321 - RNA, 19 nt, Homo Sapiens
cacguauacaccauagaau

SEQ ID NO: 322 - RNA, 20 nt, Homo Sapiens
cacguauacaccauagaaua

SEQ ID NO: 323 - RNA, 14 nt, Homo Sapiens
cauucugccucaga

SEQ ID NO: 324 - RNA, 14 nt, Homo Sapiens
cguauacaccauag

SEQ ID NO: 325 - RNA, 15 nt, Homo Sapiens
cguauacaccauaga

SEQ ID NO: 326 - RNA, 16 nt, Homo Sapiens
cguauacaccauagaa

SEQ ID NO: 327 - RNA, 17 nt, Homo Sapiens
cguauacaccauagaau

SEQ ID NO: 328 - RNA, 18 nt, Homo Sapiens
cguauacaccauagaaua

SEQ ID NO: 329 - RNA, 19 nt, Homo Sapiens
cguauacaccauagaauac

SEQ ID NO: 330 - RNA, 20 nt, Homo Sapiens
cguauacaccauagaauacu

SEQ ID NO: 331 - RNA, 14 nt, Homo Sapiens
cuaaagugcaaugc

SEQ ID NO: 332 - RNA, 14 nt, Homo Sapiens
cugaucuggacuca

SEQ ID NO: 333 - RNA, 14 nt, Homo Sapiens
gauaacaucucuca

SEQ ID NO: 334 - RNA, 15 nt, Homo Sapiens
gauaacaucucucag

SEQ ID NO: 335 - RNA, 16 nt, Homo Sapiens
gcacguauacaccaua

SEQ ID NO: 336 - RNA, 17 nt, Homo Sapiens
gcacguauacaccauag

SEQ ID NO: 337 - RNA, 18 nt, Homo Sapiens
gcacguauacaccauaga

SEQ ID NO: 338 - RNA, 19 nt, Homo Sapiens
gcacguauacaccauagaa

SEQ ID NO: 339 - RNA, 20 nt, Homo Sapiens
gcacguauacaccauagaau

SEQ ID NO: 340 - RNA, 17 nt, Homo Sapiens
ggcacguauacaccaua

SEQ ID NO: 341 - RNA, 18 nt, Homo Sapiens
ggcacguauacaccauag

SEQ ID NO: 342 - RNA, 19 nt, Homo Sapiens
ggcacguauacaccauaga

SEQ ID NO: 343 - RNA, 20 nt, Homo Sapiens
ggcacguauacaccauagaa

SEQ ID NO: 344 - RNA, 17 nt, Homo Sapiens
guauacaccauagaaua

SEQ ID NO: 345 - RNA, 18 nt, Homo Sapiens
guauacaccauagaauac

SEQ ID NO: 346 - RNA, 19 nt, Homo Sapiens
guauacaccauagaauacu

SEQ ID NO: 347 - RNA, 20 nt, Homo Sapiens
guauacaccauagaauacua

SEQ ID NO: 348 - RNA, 19 nt, Homo Sapiens
guggcacguauacaccaua

SEQ ID NO: 349 - RNA, 20 nt, Homo Sapiens
guggcacguauacaccauag

SEQ ID NO: 350 - RNA, 15 nt, Homo Sapiens
uaacaaaugcauagu

SEQ ID NO: 351 - RNA, 16 nt, Homo Sapiens
uauguuuucugaauuu

SEQ ID NO: 352 - RNA, 18 nt, Homo Sapiens
uggcacguauacaccaua

SEQ ID NO: 353 - RNA, 19 nt, Homo Sapiens
uggcacguauacaccauag

SEQ ID NO: 354 - RNA, 20 nt, Homo Sapiens
uggcacguauacaccauaga

SEQ ID NO: 355 - RNA, 14 nt, Homo Sapiens
uguaacacucaggu

SEQ ID NO: 356 - RNA, 20 nt, Homo Sapiens
uguggcacguauacaccaua

SEQ ID NO: 357 - RNA, 16 nt, Homo Sapiens
uuaacaaaugcauagu

SEQ ID NO: 358 - RNA, 16 nt, Homo Sapiens
uuuaacaaaugcauag

SEQ ID NO: 359 - RNA, 17 nt, Homo Sapiens
uuuaacaaaugcauagu

SEQ ID NO: 360 - RNA, 17 nt, Homo Sapiens
uuuuaacaaaugcauag

SEQ ID NO: 361 - RNA, 18 nt, Homo Sapiens
uuuuaacaaaugcauagu

SEQ ID NO: 362 - RNA, 17 nt, Homo Sapiens
guacaauugcuccauuu

SEQ ID NO: 363 - RNA, 17 nt, Homo Sapiens
cuuccguauuccucagu

SEQ ID NO: 364 - RNA, 17 nt, Homo Sapiens
aauuuugucgccaaacu

SEQ ID NO: 365 - RNA, 17 nt, Homo Sapiens
acccucuaguguuccug

SEQ ID NO: 366 - RNA, 17 nt, Homo Sapiens
cuuccguauuccucaug

SEQ ID NO: 367 - RNA, 17 nt, Homo Sapiens
uucacuuucccuguagg

SEQ ID NO: 368 - RNA, 15 nt, Homo Sapiens
aacaguaucuuaagg

SEQ ID NO: 369 - RNA, 15 nt, Homo Sapiens
gggcuggacgugcag

SEQ ID NO: 370 - RNA, 18 nt, Homo Sapiens
caacaaaaucaaccaaag

SEQ ID NO: 371 - RNA, 16 nt, Homo Sapiens
agcuagaugcacuguc

SEQ ID NO: 372 - RNA, 17 nt, Homo Sapiens
ugacuuccguauuccuc

SEQ ID NO: 373 - RNA, 17 nt, Homo Sapiens
cucucucaucaacccac

SEQ ID NO: 374 - RNA, 17 nt, Homo Sapiens
aacaucuaccucgcaga

SEQ ID NO: 375 - RNA, 17 nt, Homo Sapiens
ggcuuccguauuccuca

SEQ ID NO: 376 - DNA, 14 bp, Artificial Sequence
  oligonucleotide - internucleotide bonds are phosphorothioate bonds (PS)
  modified_base (1)..(4): LNA nucleoside
  modified_base (12)..(14): LNA nucleoside
agattatgactgat

SEQ ID NO: 377 - DNA, 14 bp, Artificial Sequence
  oligonucleotide - internucleotide bonds are phosphorothioate bonds (PS)
  modified_base (1)..(3): LNA nucleoside
  modified_base (11)..(14): LNA nucleoside
agattatgactgat

SEQ ID NO: 378 - DNA, 14 bp, Artificial Sequence
  oligonucleotide - internucleotide bonds are phosphorothioate bonds (PS)
  modified_base (1)..(4): LNA nucleoside
  modified_base (11)..(14): LNA nucleoside
agattatgactgat

SEQ ID NO: 379 - DNA, 14 bp, Artificial Sequence
  oligonucleotide - internucleotide bonds are phosphorothioate bonds (PS)
  modified_base (1)..(4): LNA nucleoside
  modified_base (12)..(14): LNA nucleoside
gggtcaggagaatg

SEQ ID NO: 380 - DNA, 14 bp, Artificial Sequence
  oligonucleotide - internucleotide bonds are phosphorothioate bonds (PS)
  modified_base (1)..(3): LNA nucleoside
  modified_base (13)..(14): LNA nucleoside
gggtcaggagaatg

SEQ ID NO: 381 - DNA, 14 bp, Artificial Sequence
  oligonucleotide - internucleotide bonds are phosphorothioate bonds (PS)
  modified_base (1)..(4): LNA nucleoside
  modified_base (11)..(14): LNA nucleoside
gggtcaggagaatg

SEQ ID NO: 382 - DNA, 15 bp, Artificial Sequence
  oligonucleotide - internucleotide bonds are phosphorothioate bonds (PS)
  modified_base (1)..(3): LNA nucleoside
  modified_base (12)..(15): LNA nucleoside
caaagaaggcatgga

SEQ ID NO: 383 - DNA, 15 bp, Artificial Sequence
  oligonucleotide - internucleotide bonds are phosphorothioate bonds (PS)
  modified_base (1)..(4): LNA nucleoside
  modified_base (12)..(15): LNA nucleoside
caaagaaggcatgga

SEQ ID NO: 384 - DNA, 15 bp, Artificial Sequence
  oligonucleotide - internucleotide bonds are phosphorothioate bonds (PS)
  modified_base (1)..(4): LNA nucleoside
  modified_base (13)..(15): LNA nucleoside
caaagaaggcatgga

SEQ ID NO: 385 - DNA, 14 bp, Artificial Sequence
  oligonucleotide - internucleotide bonds are phosphorothioate bonds (PS)
  modified_base (1)..(3): LNA nucleoside
  modified_base (11)..(14): LNA nucleoside
tgacactttttatc

SEQ ID NO: 386 - DNA, 14 bp, Artificial Sequence
  oligonucleotide - internucleotide bonds are phosphorothioate bonds (PS)
  modified_base (1)..(4): LNA nucleoside
  modified_base (11)..(14): LNA nucleoside
tgacactttttatc

SEQ ID NO: 387 - DNA, 14 bp, Artificial Sequence
  oligonucleotide - internucleotide bonds are phosphorothioate bonds (PS)
  modified_base (1)..(4): LNA nucleoside
  modified_base (12)..(14): LNA nucleoside
tgacactttttatc

SEQ ID NO: 388 - DNA, 14 bp, Artificial Sequence
  oligonucleotide - internucleotide bonds are phosphorothioate bonds (PS)
  modified_base (1)..(4): LNA nucleoside
  modified_base (11)..(14): LNA nucleoside
gcttcatatcctct

SEQ ID NO: 389 - DNA, 14 bp, Artificial Sequence
  oligonucleotide - internucleotide bonds are phosphorothioate bonds (PS)
  modified_base (1)..(2): LNA nucleoside
  modified_base (13)..(14): LNA nucleoside
gcttcatatcctct

SEQ ID NO: 390 - DNA, 14 bp, Artificial Sequence
  oligonucleotide - internucleotide bonds are phosphorothioate bonds (PS)
  modified_base (1)..(3): LNA nucleoside
  modified_base (12)..(14): LNA nucleoside
gcttcatatcctct

SEQ ID NO: 391 - DNA, 14 bp, Artificial Sequence
  oligonucleotide - internucleotide bonds are phosphorothioate bonds (PS)
  modified_base (1)..(2): LNA nucleoside
  modified_base (12)..(14): LNA nucleoside
gaagatcagttcct

SEQ ID NO: 392 - DNA, 14 bp, Artificial Sequence
  oligonucleotide - internucleotide bonds are phosphorothioate bonds (PS)
  modified_base (1)..(4): LNA nucleoside
  modified_base (11)..(14): LNA nucleoside
gaagatcagttcct

SEQ ID NO: 393 - DNA, 14 bp, Artificial Sequence
  oligonucleotide - internucleotide bonds are phosphorothioate bonds (PS)
  modified_base (1)..(4): LNA nucleoside
  modified_base (12)..(14): LNA nucleoside
gaagatcagttcct

SEQ ID NO: 394 - DNA, 14 bp, Artificial Sequence
  oligonucleotide - internucleotide bonds are phosphorothioate bonds (PS)
  modified_base (1)..(2): LNA nucleoside
  modified_base (13)..(14): LNA nucleoside
ttcctaggagcctg

SEQ ID NO: 395 - DNA, 14 bp, Artificial Sequence
  oligonucleotide - internucleotide bonds are phosphorothioate bonds (PS)
  modified_base (1)..(3): LNA nucleoside
  modified_base (12)..(14): LNA nucleoside
ttcctaggagcctg

SEQ ID NO: 396 - DNA, 14 bp, Artificial Sequence
  oligonucleotide - internucleotide bonds are phosphorothioate bonds (PS)
  modified_base (1)..(3): LNA nucleoside
  modified_base (11)..(14): LNA nucleoside
ttcctaggagcctg

SEQ ID NO: 397 - DNA, 14 bp, Artificial Sequence
  oligonucleotide - internucleotide bonds are phosphorothioate bonds (PS)
  modified_base (1)..(3): LNA nucleoside
  modified_base (11)..(14): LNA nucleoside
agagaagaactctc

SEQ ID NO: 398 - DNA, 14 bp, Artificial Sequence
  oligonucleotide - internucleotide bonds are phosphorothioate bonds (PS)
  modified_base (1)..(4): LNA nucleoside
  modified_base (12)..(14): LNA nucleoside
agagaagaactctc

SEQ ID NO: 399 - DNA, 14 bp, Artificial Sequence
  oligonucleotide - internucleotide bonds are phosphorothioate bonds (PS)
  modified_base (1)..(4): LNA nucleoside
  modified_base (11)..(14): LNA nucleoside
agagaagaactctc

SEQ ID NO: 400 - DNA, 14 bp, Artificial Sequence
  oligonucleotide - internucleotide bonds are phosphorothioate bonds (PS)
  modified_base (1)..(4): LNA nucleoside
  modified_base (12)..(14): LNA nucleoside
agaagggcttgggc

SEQ ID NO: 401 - DNA, 14 bp, Artificial Sequence
  oligonucleotide - internucleotide bonds are phosphorothioate bonds (PS)
  modified_base (1)..(3): LNA nucleoside
  modified_base (13)..(14): LNA nucleoside
agaagggcttgggc

SEQ ID NO: 402 - DNA, 14 bp, Artificial Sequence
  oligonucleotide - internucleotide bonds are phosphorothioate bonds (PS)
  modified_base (1)..(2): LNA nucleoside
  modified_base (13)..(14): LNA nucleoside
agaagggcttgggc

SEQ ID NO: 403 - DNA, 15 bp, Artificial Sequence
  oligonucleotide - internucleotide bonds are phosphorothioate bonds (PS)
  modified_base (1)..(2): LNA nucleoside
  modified_base (13)..(15): LNA nucleoside
agaagggcttgggcc

SEQ ID NO: 404 - DNA, 15 bp, Artificial Sequence
  oligonucleotide - internucleotide bonds are phosphorothioate bonds (PS)
  modified_base (1)..(3): LNA nucleoside
  modified_base (14)..(15): LNA nucleoside
agaagggcttgggcc

SEQ ID NO: 405 - DNA, 15 bp, Artificial Sequence
  oligonucleotide - internucleotide bonds are phosphorothioate bonds (PS)
  modified_base (1)..(2): LNA nucleoside
  modified_base (14)..(15): LNA nucleoside
agaagggcttgggcc

SEQ ID NO: 406 - DNA, 14 bp, Artificial Sequence
  oligonucleotide - internucleotide bonds are phosphorothioate bonds (PS)
  modified_base (1)..(3): LNA nucleoside
  modified_base (13)..(14): LNA nucleoside
aagggcttgggccc

SEQ ID NO: 407 - DNA, 14 bp, Artificial Sequence
  oligonucleotide - internucleotide bonds are phosphorothioate bonds (PS)
  modified_base (1)..(2): LNA nucleoside
  modified_base (13)..(14): LNA nucleoside
aagggcttgggccc

SEQ ID NO: 408 - DNA, 14 bp, Artificial Sequence
  oligonucleotide - internucleotide bonds are phosphorothioate bonds (PS)
  modified_base (1)..(2): LNA nucleoside
  modified_base (12)..(14): LNA nucleoside
aagggcttgggccc

SEQ ID NO: 409 - DNA, 15 bp, Artificial Sequence
  oligonucleotide - internucleotide bonds are phosphorothioate bonds (PS)
  modified_base (1)..(2): LNA nucleoside
  modified_base (14)..(15): LNA nucleoside
gaagggcttgggccc

SEQ ID NO: 410 - DNA, 15 bp, Artificial Sequence
  oligonucleotide - internucleotide bonds are phosphorothioate bonds (PS)
  modified_base (1)..(3): LNA nucleoside
  modified_base (14)..(15): LNA nucleoside
gaagggcttgggccc

SEQ ID NO: 411 - DNA, 15 bp, Artificial Sequence
  oligonucleotide - internucleotide bonds are phosphorothioate bonds (PS)
  modified_base (1)..(2): LNA nucleoside
  modified_base (13)..(15): LNA nucleoside
gaagggcttgggccc

SEQ ID NO: 412 - DNA, 16 bp, Artificial Sequence
  oligonucleotide - internucleotide bonds are phosphorothioate bonds (PS)
  modified_base (1)..(3): LNA nucleoside
  modified_base (15)..(16): LNA nucleoside
agaagggcttgggccc

SEQ ID NO: 413 - DNA, 16 bp, Artificial Sequence
  oligonucleotide - internucleotide bonds are phosphorothioate bonds (PS)
  modified_base (1)..(2): LNA nucleoside
  modified_base (14)..(16): LNA nucleoside
agaagggcttgggccc

SEQ ID NO: 414 - DNA, 16 bp, Artificial Sequence
  oligonucleotide - internucleotide bonds are phosphorothioate bonds (PS)
  modified_base (1)..(2): LNA nucleoside
  modified_base (15)..(16): LNA nucleoside
agaagggcttgggccc

SEQ ID NO: 415 - DNA, 15 bp, Artificial Sequence
  oligonucleotide - internucleotide bonds are phosphorothioate bonds (PS)
  modified_base (1)..(2): LNA nucleoside
  modified_base (13)..(15): LNA nucleoside
gctggccagaggcaa

SEQ ID NO: 416 - DNA, 15 bp, Artificial Sequence
  oligonucleotide - internucleotide bonds are phosphorothioate bonds (PS)
  modified_base (1)..(2): LNA nucleoside
  modified_base (14)..(15): LNA nucleoside
gctggccagaggcaa

SEQ ID NO: 417 - DNA, 15 bp, Artificial Sequence
  oligonucleotide - internucleotide bonds are phosphorothioate bonds (PS)
  modified_base (1)..(3): LNA nucleoside
  modified_base (14)..(15): LNA nucleoside
gctggccagaggcaa

SEQ ID NO: 418 - DNA, 14 bp, Artificial Sequence
  oligonucleotide - internucleotide bonds are phosphorothioate bonds (PS)
  modified_base (1)..(4): LNA nucleoside
  modified_base (11)..(14): LNA nucleoside
ggattataaacctt

SEQ ID NO: 419 - DNA, 14 bp, Artificial Sequence
  oligonucleotide - internucleotide bonds are phosphorothioate bonds (PS)
  modified_base (1)..(3): LNA nucleoside
  modified_base (11)..(14): LNA nucleoside
ggattataaacctt

SEQ ID NO: 420 - DNA, 14 bp, Artificial Sequence
  oligonucleotide - internucleotide bonds are phosphorothioate bonds (PS)
  modified_base (1)..(4): LNA nucleoside
  modified_base (12)..(14): LNA nucleoside
ggattataaacctt

SEQ ID NO: 421 - DNA, 15 bp, Artificial Sequence
  oligonucleotide - internucleotide bonds are phosphorothioate bonds (PS)
  modified_base (1)..(4): LNA nucleoside
  modified_base (13)..(15): LNA nucleoside
gattataaaccttac

SEQ ID NO: 422 - DNA, 15 bp, Artificial Sequence
  oligonucleotide - internucleotide bonds are phosphorothioate bonds (PS)
  modified_base (1)..(3): LNA nucleoside
  modified_base (12)..(15): LNA nucleoside
gattataaaccttac

SEQ ID NO: 423 - DNA, 15 bp, Artificial Sequence
  oligonucleotide - internucleotide bonds are phosphorothioate bonds (PS)
  modified_base (1)..(4): LNA nucleoside
  modified_base (12)..(15): LNA nucleoside
gattataaaccttac

SEQ ID NO: 424 - DNA, 16 bp, Artificial Sequence
  oligonucleotide - internucleotide bonds are phosphorothioate bonds (PS)
  modified_base (1)..(4): LNA nucleoside
  modified_base (13)..(16): LNA nucleoside
ggattataaaccttac

SEQ ID NO: 425 - DNA, 16 bp, Artificial Sequence
  oligonucleotide - internucleotide bonds are phosphorothioate bonds (PS)
  modified_base (1)..(4): LNA nucleoside
  modified_base (14)..(16): LNA nucleoside
ggattataaaccttac

SEQ ID NO: 426 - DNA, 16 bp, Artificial Sequence
  oligonucleotide - internucleotide bonds are phosphorothioate bonds (PS)
  modified_base (1)..(3): LNA nucleoside
  modified_base (13)..(16): LNA nucleoside
ggattataaaccttac

SEQ ID NO: 427 - DNA, 14 bp, Artificial Sequence
  oligonucleotide - internucleotide bonds are phosphorothioate bonds (PS)
  modified_base (1)..(3): LNA nucleoside
  modified_base (11)..(14): LNA nucleoside
gattataaacctta

SEQ ID NO: 428 - DNA, 14 bp, Artificial Sequence
  oligonucleotide - internucleotide bonds are phosphorothioate bonds (PS)
  modified_base (1)..(4): LNA nucleoside
  modified_base (12)..(14): LNA nucleoside
gattataaacctta

SEQ ID NO: 429 - DNA, 14 bp, Artificial Sequence
  oligonucleotide - internucleotide bonds are phosphorothioate bonds (PS)
  modified_base (1)..(4): LNA nucleoside
  modified_base (11)..(14): LNA nucleoside
gattataaacctta

SEQ ID NO: 430 - DNA, 15 bp, Artificial Sequence
  oligonucleotide - internucleotide bonds are phosphorothioate bonds (PS)
  modified_base (1)..(3): LNA nucleoside
  modified_base (12)..(15): LNA nucleoside
ggattataaacctta

SEQ ID NO: 431 - DNA, 15 bp, Artificial Sequence
  oligonucleotide - internucleotide bonds are phosphorothioate bonds (PS)
  modified_base (1)..(4): LNA nucleoside
  modified_base (13)..(15): LNA nucleoside
ggattataaacctta

SEQ ID NO: 432 - DNA, 15 bp, Artificial Sequence
  oligonucleotide - internucleotide bonds are phosphorothioate bonds (PS)
  modified_base (1)..(4): LNA nucleoside
  modified_base (12)..(15): LNA nucleoside
ggattataaacctta

SEQ ID NO: 433 - DNA, 15 bp, Artificial Sequence
  oligonucleotide - internucleotide bonds are phosphorothioate bonds (PS)
  modified_base (1)..(2): LNA nucleoside
  modified_base (12)..(15): LNA nucleoside
aaggtcctgggaggg

SEQ ID NO: 434 - DNA, 15 bp, Artificial Sequence
  oligonucleotide - internucleotide bonds are phosphorothioate bonds (PS)
  modified_base (1)..(3): LNA nucleoside
  modified_base (14)..(15): LNA nucleoside
aaggtcctgggaggg

SEQ ID NO: 435 - DNA, 15 bp, Artificial Sequence
  oligonucleotide - internucleotide bonds are phosphorothioate bonds (PS)
  modified_base (1)..(2): LNA nucleoside
  modified_base (14)..(15): LNA nucleoside
aaggtcctgggaggg

SEQ ID NO: 436 - DNA, 15 bp, Artificial Sequence
  oligonucleotide - internucleotide bonds are phosphorothioate bonds (PS)
  modified_base (1)..(4): LNA nucleoside
  modified_base (12)..(15): LNA nucleoside
tttcagaggctgcag

SEQ ID NO: 437 - DNA, 15 bp, Artificial Sequence
  oligonucleotide - internucleotide bonds are phosphorothioate bonds (PS)
  modified_base (1)..(3): LNA nucleoside
  modified_base (14)..(15): LNA nucleoside
tttcagaggctgcag

SEQ ID NO: 438 - DNA, 15 bp, Artificial Sequence
  oligonucleotide - internucleotide bonds are phosphorothioate bonds (PS)
  modified_base (1)..(2): LNA nucleoside
  modified_base (12)..(15): LNA nucleoside
tttcagaggctgcag

SEQ ID NO: 439 - DNA, 15 bp, Artificial Sequence
  oligonucleotide - internucleotide bonds are phosphorothioate bonds (PS)
  modified_base (1)..(3): LNA nucleoside
  modified_base (12)..(15): LNA nucleoside
aaaaccccagtgaag

SEQ ID NO: 440 - DNA, 15 bp, Artificial Sequence
  oligonucleotide - internucleotide bonds are phosphorothioate bonds (PS)
  modified_base (1)..(4): LNA nucleoside
  modified_base (12)..(15): LNA nucleoside
aaaaccccagtgaag

SEQ ID NO: 441 - DNA, 15 bp, Artificial Sequence
  oligonucleotide - internucleotide bonds are phosphorothioate bonds (PS)
  modified_base (1)..(2): LNA nucleoside
  modified_base (12)..(15): LNA nucleoside
aaaaccccagtgaag

SEQ ID NO: 442 - DNA, 16 bp, Artificial Sequence
  oligonucleotide - internucleotide bonds are phosphorothioate bonds (PS)
  modified_base (1)..(3): LNA nucleoside
  modified_base (15)..(16): LNA nucleoside
caaaaccccagtgaag

SEQ ID NO: 443 - DNA, 16 bp, Artificial Sequence
  oligonucleotide - internucleotide bonds are phosphorothioate bonds (PS)
  modified_base (1)..(3): LNA nucleoside
  modified_base (13)..(16): LNA nucleoside
caaaaccccagtgaag

SEQ ID NO: 444 - DNA, 16 bp, Artificial Sequence
  oligonucleotide - internucleotide bonds are phosphorothioate bonds (PS)
  modified_base (1)..(4): LNA nucleoside
  modified_base (13)..(16): LNA nucleoside
caaaaccccagtgaag

SEQ ID NO: 445 - DNA, 14 bp, Artificial Sequence
  oligonucleotide - internucleotide bonds are phosphorothioate bonds (PS)
  modified_base (1)..(4): LNA nucleoside
  modified_base (11)..(14): LNA nucleoside
aaccccagtgaagc

SEQ ID NO: 446 - DNA, 14 bp, Artificial Sequence
  oligonucleotide - internucleotide bonds are phosphorothioate bonds (PS)
  modified_base (1)..(2): LNA nucleoside
  modified_base (13)..(14): LNA nucleoside
aaccccagtgaagc

SEQ ID NO: 447 - DNA, 14 bp, Artificial Sequence
  oligonucleotide - internucleotide bonds are phosphorothioate bonds (PS)
  modified_base (1)..(3): LNA nucleoside
  modified_base (12)..(14): LNA nucleoside
aaccccagtgaagc

SEQ ID NO: 448 - DNA, 15 bp, Artificial Sequence
  oligonucleotide - internucleotide bonds are phosphorothioate bonds (PS)
  modified_base (1)..(4): LNA nucleoside
  modified_base (12)..(15): LNA nucleoside
aaaccccagtgaagc

SEQ ID NO: 449 - DNA, 15 bp, Artificial Sequence
  oligonucleotide - internucleotide bonds are phosphorothioate bonds (PS)
  modified_base (1)..(3): LNA nucleoside
  modified_base (12)..(15): LNA nucleoside
aaaccccagtgaagc

SEQ ID NO: 450 - DNA, 15 bp, Artificial Sequence
  oligonucleotide - internucleotide bonds are phosphorothioate bonds (PS)
  modified_base (1)..(2): LNA nucleoside
  modified_base (14)..(15): LNA nucleoside
aaaccccagtgaagc

SEQ ID NO: 451 - DNA, 16 bp, Artificial Sequence
  oligonucleotide - internucleotide bonds are phosphorothioate bonds (PS)
  modified_base (1)..(4): LNA nucleoside
  modified_base (14)..(16): LNA nucleoside
aaaaccccagtgaagc

SEQ ID NO: 452 - DNA, 16 bp, Artificial Sequence
  oligonucleotide - internucleotide bonds are phosphorothioate bonds (PS)
  modified_base (1)..(4): LNA nucleoside
  modified_base (13)..(16): LNA nucleoside
aaaaccccagtgaagc

SEQ ID NO: 453 - DNA, 16 bp, Artificial Sequence
  oligonucleotide - internucleotide bonds are phosphorothioate bonds (PS)
  modified_base (1)..(2): LNA nucleoside
  modified_base (15)..(16): LNA nucleoside
aaaaccccagtgaagc

SEQ ID NO: 454 - DNA, 17 bp, Artificial Sequence
  oligonucleotide - internucleotide bonds are phosphorothioate bonds (PS)
  modified_base (1)..(2): LNA nucleoside
  modified_base (16)..(17): LNA nucleoside
caaaaccccagtgaagc

SEQ ID NO: 455 - DNA, 17 bp, Artificial Sequence
  oligonucleotide - internucleotide bonds are phosphorothioate bonds (PS)
  modified_base (1)..(3): LNA nucleoside
  modified_base (16)..(17): LNA nucleoside
caaaaccccagtgaagc

SEQ ID NO: 456 - DNA, 17 bp, Artificial Sequence
  oligonucleotide - internucleotide bonds are phosphorothioate bonds (PS)
  modified_base (1)..(3): LNA nucleoside
  modified_base (14)..(17): LNA nucleoside
caaaaccccagtgaagc

SEQ ID NO: 457 - DNA, 14 bp, Artificial Sequence
  oligonucleotide - internucleotide bonds are phosphorothioate bonds (PS)
  modified_base (1)..(3): LNA nucleoside
  modified_base (13)..(14): LNA nucleoside
accccagtgaagcc

SEQ ID NO: 458 - DNA, 14 bp, Artificial Sequence
  oligonucleotide - internucleotide bonds are phosphorothioate bonds (PS)
  modified_base (1)..(2): LNA nucleoside
  modified_base (13)..(14): LNA nucleoside
accccagtgaagcc

SEQ ID NO: 459 - DNA, 14 bp, Artificial Sequence
  oligonucleotide - internucleotide bonds are phosphorothioate bonds (PS)
  modified_base (1)..(2): LNA nucleoside
  modified_base (12)..(14): LNA nucleoside
accccagtgaagcc

SEQ ID NO: 460 - DNA, 15 bp, Artificial Sequence
  oligonucleotide - internucleotide bonds are phosphorothioate bonds (PS)
  modified_base (1)..(2): LNA nucleoside
  modified_base (14)..(15): LNA nucleoside
aaccccagtgaagcc

SEQ ID NO: 461 - DNA, 15 bp, Artificial Sequence
  oligonucleotide - internucleotide bonds are phosphorothioate bonds (PS)
  modified_base (1)..(4): LNA nucleoside
  modified_base (14)..(15): LNA nucleoside
aaccccagtgaagcc

SEQ ID NO: 462 - DNA, 15 bp, Artificial Sequence
  oligonucleotide - internucleotide bonds are phosphorothioate bonds (PS)
  modified_base (1)..(3): LNA nucleoside
  modified_base (14)..(15): LNA nucleoside
aaccccagtgaagcc

SEQ ID NO: 463 - DNA, 16 bp, Artificial Sequence
  oligonucleotide - internucleotide bonds are phosphorothioate bonds (PS)
  modified_base (1)..(3): LNA nucleoside
  modified_base (14)..(16): LNA nucleoside
aaaccccagtgaagcc

SEQ ID NO: 464 - DNA, 16 bp, Artificial Sequence
  oligonucleotide - internucleotide bonds are phosphorothioate bonds (PS)
  modified_base (1)..(3): LNA nucleoside
  modified_base (15)..(16): LNA nucleoside
aaaccccagtgaagcc

SEQ ID NO: 465 - DNA, 16 bp, Artificial Sequence
  oligonucleotide - internucleotide bonds are phosphorothioate bonds (PS)
  modified_base (1)..(2): LNA nucleoside
  modified_base (15)..(16): LNA nucleoside
aaaccccagtgaagcc

SEQ ID NO: 466 - DNA, 17 bp, Artificial Sequence
  oligonucleotide - internucleotide bonds are phosphorothioate bonds (PS)
  modified_base (1)..(3): LNA nucleoside
  modified_base (16)..(17): LNA nucleoside
aaaaccccagtgaagcc

SEQ ID NO: 467 - DNA, 17 bp, Artificial Sequence
  oligonucleotide - internucleotide bonds are phosphorothioate bonds (PS)
  modified_base (1)..(2): LNA nucleoside
  modified_base (15)..(17): LNA nucleoside
aaaaccccagtgaagcc

SEQ ID NO: 468 - DNA, 17 bp, Artificial Sequence
  oligonucleotide - internucleotide bonds are phosphorothioate bonds (PS)
  modified_base (1)..(2): LNA nucleoside
  modified_base (16)..(17): LNA nucleoside
aaaaccccagtgaagcc

SEQ ID NO: 469 - DNA, 18 bp, Artificial Sequence
  oligonucleotide - internucleotide bonds are phosphorothioate bonds (PS)
  modified_base (1)..(4): LNA nucleoside
  modified_base (17)..(18): LNA nucleoside
caaaaccccagtgaagcc

SEQ ID NO: 470 - DNA, 18 bp, Artificial Sequence
  oligonucleotide - internucleotide bonds are phosphorothioate bonds (PS)
  modified_base (1)..(2): LNA nucleoside
  modified_base (17)..(18): LNA nucleoside
caaaaccccagtgaagcc

SEQ ID NO: 471 - DNA, 18 bp, Artificial Sequence
  oligonucleotide - internucleotide bonds are phosphorothioate bonds (PS)
  modified_base (1)..(3): LNA nucleoside
  modified_base (17)..(18): LNA nucleoside
caaaaccccagtgaagcc

SEQ ID NO: 472 - DNA, 15 bp, Artificial Sequence
  oligonucleotide - internucleotide bonds are phosphorothioate bonds (PS)
  modified_base (1)..(3): LNA nucleoside
  modified_base (14)..(15): LNA nucleoside
ctctttccctgaccc

SEQ ID NO: 473 - DNA, 15 bp, Artificial Sequence
  oligonucleotide - internucleotide bonds are phosphorothioate bonds (PS)
  modified_base (1)..(2): LNA nucleoside
  modified_base (13)..(15): LNA nucleoside
ctctttccctgaccc

SEQ ID NO: 474 - DNA, 15 bp, Artificial Sequence
  oligonucleotide - internucleotide bonds are phosphorothioate bonds (PS)
  modified_base (1)..(2): LNA nucleoside
  modified_base (14)..(15): LNA nucleoside
ctctttccctgaccc

SEQ ID NO: 475 - DNA, 14 bp, Artificial Sequence
  oligonucleotide - internucleotide bonds are phosphorothioate bonds (PS)
  modified_base (1)..(4): LNA nucleoside
  modified_base (12)..(14): LNA nucleoside
aggagcagattcta

SEQ ID NO: 476 - DNA, 14 bp, Artificial Sequence
  oligonucleotide - internucleotide bonds are phosphorothioate bonds (PS)
  modified_base (1)..(4): LNA nucleoside
  modified_base (11)..(14): LNA nucleoside
aggagcagattcta

SEQ ID NO: 477 - DNA, 14 bp, Artificial Sequence
  oligonucleotide - internucleotide bonds are phosphorothioate bonds (PS)
  modified_base (1)..(2): LNA nucleoside
  modified_base (12)..(14): LNA nucleoside
aggagcagattcta

SEQ ID NO: 478 - DNA, 14 bp, Artificial Sequence
  oligonucleotide - internucleotide bonds are phosphorothioate bonds (PS)
  modified_base (1)..(2): LNA nucleoside
  modified_base (11)..(14): LNA nucleoside
tacccagtcaagga

SEQ ID NO: 479 - DNA, 14 bp, Artificial Sequence
  oligonucleotide - internucleotide bonds are phosphorothioate bonds (PS)
  modified_base (1)..(4): LNA nucleoside
  modified_base (11)..(14): LNA nucleoside
tacccagtcaagga

SEQ ID NO: 480 - DNA, 14 bp, Artificial Sequence
  oligonucleotide - internucleotide bonds are phosphorothioate bonds (PS)
  modified_base (1)..(2): LNA nucleoside
  modified_base (13)..(14): LNA nucleoside
tacccagtcaagga

SEQ ID NO: 481 - DNA, 15 bp, Artificial Sequence
  oligonucleotide - internucleotide bonds are phosphorothioate bonds (PS)
  modified_base (1)..(3): LNA nucleoside
  modified_base (12)..(15): LNA nucleoside
caaaaccccagtgaa

SEQ ID NO: 482 - DNA, 15 bp, Artificial Sequence
  oligonucleotide - internucleotide bonds are phosphorothioate bonds (PS)
  modified_base (1)..(4): LNA nucleoside
  modified_base (13)..(15): LNA nucleoside
caaaaccccagtgaa

SEQ ID NO: 483 - DNA, 15 bp, Artificial Sequence
  oligonucleotide - internucleotide bonds are phosphorothioate bonds (PS)
  modified_base (1)..(4): LNA nucleoside
  modified_base (12)..(15): LNA nucleoside
caaaaccccagtgaa

SEQ ID NO: 484 - DNA, 14 bp, Artificial Sequence
  oligonucleotide - internucleotide bonds are phosphorothioate bonds (PS)
  modified_base (1)..(3): LNA nucleoside
  modified_base (11)..(14): LNA nucleoside
ctcaaacctggttg

SEQ ID NO: 485 - DNA, 14 bp, Artificial Sequence
  oligonucleotide - internucleotide bonds are phosphorothioate bonds (PS)
  modified_base (1)..(4): LNA nucleoside
  modified_base (11)..(14): LNA nucleoside
ctcaaacctggttg

SEQ ID NO: 486 - DNA, 14 bp, Artificial Sequence
  oligonucleotide - internucleotide bonds are phosphorothioate bonds (PS)
  modified_base (1)..(4): LNA nucleoside
  modified_base (13)..(14): LNA nucleoside
ctcaaacctggttg

SEQ ID NO: 487 - DNA, 14 bp, Artificial Sequence
  oligonucleotide - internucleotide bonds are phosphorothioate bonds (PS)
  modified_base (1)..(4): LNA nucleoside
  modified_base (11)..(14): LNA nucleoside
gaagatgaatgtca

SEQ ID NO: 488 - DNA, 14 bp, Artificial Sequence
  oligonucleotide - internucleotide bonds are phosphorothioate bonds (PS)
  modified_base (1)..(3): LNA nucleoside
  modified_base (11)..(14): LNA nucleoside
gaagatgaatgtca

SEQ ID NO: 489 - DNA, 14 bp, Artificial Sequence
  oligonucleotide - internucleotide bonds are phosphorothioate bonds (PS)
  modified_base (1)..(4): LNA nucleoside
  modified_base (12)..(14): LNA nucleoside
gaagatgaatgtca

SEQ ID NO: 490 - DNA, 14 bp, Artificial Sequence
  oligonucleotide - internucleotide bonds are phosphorothioate bonds (PS)
  modified_base (1)..(2): LNA nucleoside
  modified_base (12)..(14): LNA nucleoside
catttagttaccca

SEQ ID NO: 491 - DNA, 14 bp, Artificial Sequence
  oligonucleotide - internucleotide bonds are phosphorothioate bonds (PS)
  modified_base (1)..(2): LNA nucleoside
  modified_base (11)..(14): LNA nucleoside
catttagttaccca

SEQ ID NO: 492 - DNA, 14 bp, Artificial Sequence
  oligonucleotide - internucleotide bonds are phosphorothioate bonds (PS)
  modified_base (1)..(4): LNA nucleoside
  modified_base (11)..(14): LNA nucleoside
catttagttaccca

SEQ ID NO: 493 - DNA, 14 bp, Artificial Sequence
  oligonucleotide - internucleotide bonds are phosphorothioate bonds (PS)
  modified_base (1)..(4): LNA nucleoside
  modified_base (11)..(14): LNA nucleoside
atttagttacccaa

SEQ ID NO: 494 - DNA, 14 bp, Artificial Sequence
  oligonucleotide - internucleotide bonds are phosphorothioate bonds (PS)
  modified_base (1)..(3): LNA nucleoside
  modified_base (11)..(14): LNA nucleoside
atttagttacccaa

SEQ ID NO: 495 - DNA, 14 bp, Artificial Sequence
  oligonucleotide - internucleotide bonds are phosphorothioate bonds (PS)
  modified_base (1)..(2): LNA nucleoside
  modified_base (11)..(14): LNA nucleoside
atttagttacccaa

SEQ ID NO: 496 - DNA, 15 bp, Artificial Sequence
  oligonucleotide - internucleotide bonds are phosphorothioate bonds (PS)
  modified_base (1)..(3): LNA nucleoside
  modified_base (12)..(15): LNA nucleoside
catttagttacccaa

SEQ ID NO: 497 - DNA, 15 bp, Artificial Sequence
  oligonucleotide - internucleotide bonds are phosphorothioate bonds (PS)
  modified_base (1)..(3): LNA nucleoside
  modified_base (13)..(15): LNA nucleoside
catttagttacccaa

SEQ ID NO: 498 - DNA, 15 bp, Artificial Sequence
  oligonucleotide - internucleotide bonds are phosphorothioate bonds (PS)
  modified_base (1)..(4): LNA nucleoside
  modified_base (12)..(15): LNA nucleoside
catttagttacccaa

SEQ ID NO: 499 - DNA, 14 bp, Artificial Sequence
  oligonucleotide - internucleotide bonds are phosphorothioate bonds (PS)
  modified_base (1)..(2): LNA nucleoside
  modified_base (12)..(14): LNA nucleoside
gctcttgcttggtt

SEQ ID NO: 500 - DNA, 14 bp, Artificial Sequence
  oligonucleotide - internucleotide bonds are phosphorothioate bonds (PS)
  modified_base (1)..(2): LNA nucleoside
  modified_base (13)..(14): LNA nucleoside
gctcttgcttggtt

SEQ ID NO: 501 - DNA, 14 bp, Artificial Sequence
  oligonucleotide - internucleotide bonds are phosphorothioate bonds (PS)
  modified_base (1)..(4): LNA nucleoside
  modified_base (12)..(14): LNA nucleoside
gctcttgcttggtt

SEQ ID NO: 502 - DNA, 15 bp, Artificial Sequence
  oligonucleotide - internucleotide bonds are phosphorothioate bonds (PS)
  modified_base (1)..(3): LNA nucleoside
  modified_base (13)..(15): LNA nucleoside
tgctcttgcttggtt

SEQ ID NO: 503 - DNA, 15 bp, Artificial Sequence
  oligonucleotide - internucleotide bonds are phosphorothioate bonds (PS)
  modified_base (1)..(2): LNA nucleoside
  modified_base (14)..(15): LNA nucleoside
tgctcttgcttggtt

SEQ ID NO: 504 - DNA, 15 bp, Artificial Sequence
  oligonucleotide - internucleotide bonds are phosphorothioate bonds (PS)
  modified_base (1)..(2): LNA nucleoside
  modified_base (13)..(15): LNA nucleoside
tgctcttgcttggtt

SEQ ID NO: 505 - DNA, 14 bp, Artificial Sequence
  oligonucleotide - internucleotide bonds are phosphorothioate bonds (PS)
  modified_base (1)..(2): LNA nucleoside
  modified_base (13)..(14): LNA nucleoside
tgctcttgcttggt

SEQ ID NO: 506 - DNA, 14 bp, Artificial Sequence
  oligonucleotide - internucleotide bonds are phosphorothioate bonds (PS)
  modified_base (1)..(2): LNA nucleoside
  modified_base (12)..(14): LNA nucleoside
tgctcttgcttggt

SEQ ID NO: 507 - DNA, 14 bp, Artificial Sequence
  oligonucleotide - internucleotide bonds are phosphorothioate bonds (PS)
  modified_base (1)..(4): LNA nucleoside
  modified_base (12)..(14): LNA nucleoside
tgctcttgcttggt

SEQ ID NO: 508 - DNA, 14 bp, Artificial Sequence
  oligonucleotide - internucleotide bonds are phosphorothioate bonds (PS)
  modified_base (1)..(4): LNA nucleoside
  modified_base (11)..(14): LNA nucleoside
catcatcagttact

SEQ ID NO: 509 - DNA, 14 bp, Artificial Sequence
  oligonucleotide - internucleotide bonds are phosphorothioate bonds (PS)
  modified_base (1)..(3): LNA nucleoside
  modified_base (11)..(14): LNA nucleoside
catcatcagttact

SEQ ID NO: 510 - DNA, 14 bp, Artificial Sequence
  oligonucleotide - internucleotide bonds are phosphorothioate bonds (PS)
  modified_base (1)..(4): LNA nucleoside
  modified_base (12)..(14): LNA nucleoside
catcatcagttact

SEQ ID NO: 511 - DNA, 15 bp, Artificial Sequence
  oligonucleotide - internucleotide bonds are phosphorothioate bonds (PS)
  modified_base (1)..(4): LNA nucleoside
  modified_base (13)..(15): LNA nucleoside
ctgaaactcaaagtg

SEQ ID NO: 512 - DNA, 15 bp, Artificial Sequence
  oligonucleotide - internucleotide bonds are phosphorothioate bonds (PS)
  modified_base (1)..(3): LNA nucleoside
  modified_base (12)..(15): LNA nucleoside
ctgaaactcaaagtg

SEQ ID NO: 513 - DNA, 15 bp, Artificial Sequence
  oligonucleotide - internucleotide bonds are phosphorothioate bonds (PS)
  modified_base (1)..(4): LNA nucleoside
  modified_base (12)..(15): LNA nucleoside
ctgaaactcaaagtg

SEQ ID NO: 514 - DNA, 16 bp, Artificial Sequence
  oligonucleotide - internucleotide bonds are phosphorothioate bonds (PS)
  modified_base (1)..(4): LNA nucleoside
  modified_base (13)..(16): LNA nucleoside
actgaaactcaaagtg

SEQ ID NO: 515 - DNA, 16 bp, Artificial Sequence
  oligonucleotide - internucleotide bonds are phosphorothioate bonds (PS)
  modified_base (1)..(4): LNA nucleoside
  modified_base (14)..(16): LNA nucleoside
actgaaactcaaagtg

SEQ ID NO: 516 - DNA, 16 bp, Artificial Sequence
  oligonucleotide - internucleotide bonds are phosphorothioate bonds (PS)
  modified_base (1)..(3): LNA nucleoside
  modified_base (13)..(16): LNA nucleoside
actgaaactcaaagtg

SEQ ID NO: 517 - DNA, 14 bp, Artificial Sequence
  oligonucleotide - internucleotide bonds are phosphorothioate bonds (PS)
  modified_base (1)..(4): LNA nucleoside
  modified_base (11)..(14): LNA nucleoside
tctaaggtgatctg

SEQ ID NO: 518 - DNA, 14 bp, Artificial Sequence
  oligonucleotide - internucleotide bonds are phosphorothioate bonds (PS)
  modified_base (1)..(3): LNA nucleoside
  modified_base (11)..(14): LNA nucleoside
tctaaggtgatctg

SEQ ID NO: 519 - DNA, 14 bp, Artificial Sequence
  oligonucleotide - internucleotide bonds are phosphorothioate bonds (PS)
  modified_base (1)..(4): LNA nucleoside
  modified_base (12)..(14): LNA nucleoside
tctaaggtgatctg

SEQ ID NO: 520 - DNA, 20 bp, Artificial Sequence
  oligonucleotide - internucleotide bonds are phosphorothioate bonds (PS)
  modified_base (1)..(2): LNA nucleoside
  modified_base (19)..(20): LNA nucleoside
ctatttttaattttctgagg

SEQ ID NO: 521 - DNA, 20 bp, Artificial Sequence
  oligonucleotide - internucleotide bonds are phosphorothioate bonds (PS)
  modified_base (1)..(2): LNA nucleoside
  modified_base (18)..(20): LNA nucleoside
ctatttttaattttctgagg

SEQ ID NO: 522 - DNA, 20 bp, Artificial Sequence
  oligonucleotide - internucleotide bonds are phosphorothioate bonds (PS)
  modified_base (1)..(4): LNA nucleoside
  modified_base (17)..(20): LNA nucleoside
ctatttttaattttctgagg

SEQ ID NO: 523 - DNA, 15 bp, Artificial Sequence
  oligonucleotide - internucleotide bonds are phosphorothioate bonds (PS)
  modified_base (1)..(3): LNA nucleoside
  modified_base (14)..(15): LNA nucleoside
gttcatttctccatc

SEQ ID NO: 524 - DNA, 15 bp, Artificial Sequence
  oligonucleotide - internucleotide bonds are phosphorothioate bonds (PS)
  modified_base (1)..(4): LNA nucleoside
  modified_base (12)..(15): LNA nucleoside
gttcatttctccatc

SEQ ID NO: 525 - DNA, 15 bp, Artificial Sequence
  oligonucleotide - internucleotide bonds are phosphorothioate bonds (PS)
  modified_base (1)..(3): LNA nucleoside
  modified_base (12)..(15): LNA nucleoside
gttcatttctccatc

SEQ ID NO: 526 - DNA, 14 bp, Artificial Sequence
  oligonucleotide - internucleotide bonds are phosphorothioate bonds (PS)
  modified_base (1)..(4): LNA nucleoside
  modified_base (11)..(14): LNA nucleoside
ctcctgggtaaagc

SEQ ID NO: 527 - DNA, 14 bp, Artificial Sequence
  oligonucleotide - internucleotide bonds are phosphorothioate bonds (PS)
  modified_base (1)..(2): LNA nucleoside
  modified_base (13)..(14): LNA nucleoside
ctcctgggtaaagc

SEQ ID NO: 528 - DNA, 14 bp, Artificial Sequence
  oligonucleotide - internucleotide bonds are phosphorothioate bonds (PS)
  modified_base (1)..(3): LNA nucleoside
  modified_base (12)..(14): LNA nucleoside
ctcctgggtaaagc

SEQ ID NO: 529 - DNA, 15 bp, Artificial Sequence
  oligonucleotide - internucleotide bonds are phosphorothioate bonds (PS)
  modified_base (1)..(4): LNA nucleoside
  modified_base (12)..(15): LNA nucleoside
ttcatttctccatcc

SEQ ID NO: 530 - DNA, 15 bp, Artificial Sequence
  oligonucleotide - internucleotide bonds are phosphorothioate bonds (PS)
  modified_base (1)..(4): LNA nucleoside
  modified_base (14)..(15): LNA nucleoside
ttcatttctccatcc

SEQ ID NO: 531 - DNA, 15 bp, Artificial Sequence
  oligonucleotide - internucleotide bonds are phosphorothioate bonds (PS)
  modified_base (1)..(2): LNA nucleoside
  modified_base (14)..(15): LNA nucleoside
ttcatttctccatcc

SEQ ID NO: 532 - DNA, 16 bp, Artificial Sequence
  oligonucleotide - internucleotide bonds are phosphorothioate bonds (PS)
  modified_base (1)..(3): LNA nucleoside
  modified_base (13)..(16): LNA nucleoside
gttcatttctccatcc

SEQ ID NO: 533 - DNA, 16 bp, Artificial Sequence
  oligonucleotide - internucleotide bonds are phosphorothioate bonds (PS)
  modified_base (1)..(3): LNA nucleoside
  modified_base (15)..(16): LNA nucleoside
gttcatttctccatcc

SEQ ID NO: 534 - DNA, 16 bp, Artificial Sequence
  oligonucleotide - internucleotide bonds are phosphorothioate bonds (PS)
  modified_base (1)..(2): LNA nucleoside
  modified_base (15)..(16): LNA nucleoside
gttcatttctccatcc

SEQ ID NO: 535 - DNA, 14 bp, Artificial Sequence
  oligonucleotide - internucleotide bonds are phosphorothioate bonds (PS)
  modified_base (1)..(3): LNA nucleoside
  modified_base (12)..(14): LNA nucleoside
tcctgggtaaagcc

SEQ ID NO: 536 - DNA, 14 bp, Artificial Sequence
  oligonucleotide - internucleotide bonds are phosphorothioate bonds (PS)
  modified_base (1)..(2): LNA nucleoside
  modified_base (12)..(14): LNA nucleoside
tcctgggtaaagcc

SEQ ID NO: 537 - DNA, 14 bp, Artificial Sequence
  oligonucleotide - internucleotide bonds are phosphorothioate bonds (PS)
  modified_base (1)..(2): LNA nucleoside
  modified_base (13)..(14): LNA nucleoside
tcctgggtaaagcc

SEQ ID NO: 538 - DNA, 15 bp, Artificial Sequence
  oligonucleotide - internucleotide bonds are phosphorothioate bonds (PS)
  modified_base (1)..(3): LNA nucleoside
  modified_base (14)..(15): LNA nucleoside
ctcctgggtaaagcc

SEQ ID NO: 539 - DNA, 15 bp, Artificial Sequence
  oligonucleotide - internucleotide bonds are phosphorothioate bonds (PS)
  modified_base (1)..(2): LNA nucleoside
  modified_base (13)..(15): LNA nucleoside
ctcctgggtaaagcc

SEQ ID NO: 540 - DNA, 15 bp, Artificial Sequence
  oligonucleotide - internucleotide bonds are phosphorothioate bonds (PS)
  modified_base (1)..(2): LNA nucleoside
  modified_base (14)..(15): LNA nucleoside
ctcctgggtaaagcc

SEQ ID NO: 541 - DNA, 20 bp, Artificial Sequence
  oligonucleotide - internucleotide bonds are phosphorothioate bonds (PS)
  modified_base (1)..(4): LNA nucleoside
  modified_base (17)..(20): LNA nucleoside
tttttaattttctgaggaac

SEQ ID NO: 542 - DNA, 20 bp, Artificial Sequence
  oligonucleotide - internucleotide bonds are phosphorothioate bonds (PS)
  modified_base (1)..(4): LNA nucleoside
  modified_base (19)..(20): LNA nucleoside
tttttaattttctgaggaac

SEQ ID NO: 543 - DNA, 20 bp, Artificial Sequence
  oligonucleotide - internucleotide bonds are phosphorothioate bonds (PS)
  modified_base (1)..(3): LNA nucleoside
  modified_base (17)..(20): LNA nucleoside
tttttaattttctgaggaac

SEQ ID NO: 544 - DNA, 15 bp, Artificial Sequence
  oligonucleotide - internucleotide bonds are phosphorothioate bonds (PS)
  modified_base (1)..(4): LNA nucleoside
  modified_base (13)..(15): LNA nucleoside
agaggcaaacagaac

SEQ ID NO: 545 - DNA, 15 bp, Artificial Sequence
  oligonucleotide - internucleotide bonds are phosphorothioate bonds (PS)
  modified_base (1)..(4): LNA nucleoside
  modified_base (12)..(15): LNA nucleoside
agaggcaaacagaac

SEQ ID NO: 546 - DNA, 15 bp, Artificial Sequence
  oligonucleotide - internucleotide bonds are phosphorothioate bonds (PS)
  modified_base (1)..(3): LNA nucleoside
  modified_base (12)..(15): LNA nucleoside
agaggcaaacagaac

SEQ ID NO: 547 - DNA, 20 bp, Artificial Sequence
  oligonucleotide - internucleotide bonds are phosphorothioate bonds (PS)
  modified_base (1)..(3): LNA nucleoside
  modified_base (19)..(20): LNA nucleoside
ttctatttttaattttctga

SEQ ID NO: 548 - DNA, 20 bp, Artificial Sequence
  oligonucleotide - internucleotide bonds are phosphorothioate bonds (PS)
  modified_base (1)..(4): LNA nucleoside
  modified_base (17)..(20): LNA nucleoside
ttctatttttaattttctga

SEQ ID NO: 549 - DNA, 20 bp, Artificial Sequence
  oligonucleotide - internucleotide bonds are phosphorothioate bonds (PS)
  modified_base (1)..(4): LNA nucleoside
  modified_base (18)..(20): LNA nucleoside
ttctatttttaattttctga

SEQ ID NO: 550 - DNA, 15 bp, Artificial Sequence
  oligonucleotide - internucleotide bonds are phosphorothioate bonds (PS)
  modified_base (1)..(3): LNA nucleoside
  modified_base (13)..(15): LNA nucleoside
gaggcaaacagaaca

SEQ ID NO: 551 - DNA, 15 bp, Artificial Sequence
  oligonucleotide - internucleotide bonds are phosphorothioate bonds (PS)
  modified_base (1)..(4): LNA nucleoside
  modified_base (13)..(15): LNA nucleoside
gaggcaaacagaaca

SEQ ID NO: 552 - DNA, 15 bp, Artificial Sequence
  oligonucleotide - internucleotide bonds are phosphorothioate bonds (PS)
  modified_base (1)..(4): LNA nucleoside
  modified_base (12)..(15): LNA nucleoside
gaggcaaacagaaca

SEQ ID NO: 553 - DNA, 16 bp, Artificial Sequence
  oligonucleotide - internucleotide bonds are phosphorothioate bonds (PS)
  modified_base (1)..(3): LNA nucleoside
  modified_base (15)..(16): LNA nucleoside
agaggcaaacagaaca

SEQ ID NO: 554 - DNA, 16 bp, Artificial Sequence
  oligonucleotide - internucleotide bonds are phosphorothioate bonds (PS)
  modified_base (1)..(4): LNA nucleoside
  modified_base (13)..(16): LNA nucleoside
agaggcaaacagaaca

SEQ ID NO: 555 - DNA, 16 bp, Artificial Sequence
  oligonucleotide - internucleotide bonds are phosphorothioate bonds (PS)
  modified_base (1)..(4): LNA nucleoside
  modified_base (14)..(16): LNA nucleoside
agaggcaaacagaaca

SEQ ID NO: 556 - DNA, 14 bp, Artificial Sequence
  oligonucleotide - internucleotide bonds are phosphorothioate bonds (PS)
  modified_base (1)..(4): LNA nucleoside
  modified_base (13)..(14): LNA nucleoside
ctgctagattagag

SEQ ID NO: 557 - DNA, 14 bp, Artificial Sequence
  oligonucleotide - internucleotide bonds are phosphorothioate bonds (PS)
  modified_base (1)..(4): LNA nucleoside
  modified_base (12)..(14): LNA nucleoside
ctgctagattagag

SEQ ID NO: 558 - DNA, 14 bp, Artificial Sequence
  oligonucleotide - internucleotide bonds are phosphorothioate bonds (PS)
  modified_base (1)..(4): LNA nucleoside
  modified_base (11)..(14): LNA nucleoside
ctgctagattagag

SEQ ID NO: 559 - DNA, 14 bp, Artificial Sequence
  oligonucleotide - internucleotide bonds are phosphorothioate bonds (PS)
  modified_base (1)..(4): LNA nucleoside
  modified_base (12)..(14): LNA nucleoside
cttagctgagattt

SEQ ID NO: 560 - DNA, 14 bp, Artificial Sequence
  oligonucleotide - internucleotide bonds are phosphorothioate bonds (PS)
  modified_base (1)..(4): LNA nucleoside
  modified_base (11)..(14): LNA nucleoside
cttagctgagattt

SEQ ID NO: 561 - DNA, 14 bp, Artificial Sequence
  oligonucleotide - internucleotide bonds are phosphorothioate bonds (PS)
  modified_base (1)..(3): LNA nucleoside
  modified_base (11)..(14): LNA nucleoside
cttagctgagattt

SEQ ID NO: 562 - DNA, 14 bp, Artificial Sequence
  oligonucleotide - internucleotide bonds are phosphorothioate bonds (PS)
  modified_base (1)..(4): LNA nucleoside
  modified_base (12)..(14): LNA nucleoside
ccaattaaatacct

SEQ ID NO: 563 - DNA, 14 bp, Artificial Sequence
  oligonucleotide - internucleotide bonds are phosphorothioate bonds (PS)
  modified_base (1)..(4): LNA nucleoside
  modified_base (11)..(14): LNA nucleoside
ccaattaaatacct

SEQ ID NO: 564 - DNA, 14 bp, Artificial Sequence
  oligonucleotide - internucleotide bonds are phosphorothioate bonds (PS)
  modified_base (1)..(3): LNA nucleoside
  modified_base (11)..(14): LNA nucleoside
ccaattaaatacct

SEQ ID NO: 565 - DNA, 14 bp, Artificial Sequence
  oligonucleotide - internucleotide bonds are phosphorothioate bonds (PS)
  modified_base (1)..(4): LNA nucleoside
  modified_base (11)..(14): LNA nucleoside
caattaaatacctg

SEQ ID NO: 566 - DNA, 14 bp, Artificial Sequence
  oligonucleotide - internucleotide bonds are phosphorothioate bonds (PS)
  modified_base (1)..(2): LNA nucleoside
  modified_base (11)..(14): LNA nucleoside
caattaaatacctg

SEQ ID NO: 567 - DNA, 14 bp, Artificial Sequence
  oligonucleotide - internucleotide bonds are phosphorothioate bonds (PS)
  modified_base (1)..(3): LNA nucleoside
  modified_base (11)..(14): LNA nucleoside
caattaaatacctg

SEQ ID NO: 568 - DNA, 15 bp, Artificial Sequence
  oligonucleotide - internucleotide bonds are phosphorothioate bonds (PS)
  modified_base (1)..(4): LNA nucleoside
  modified_base (12)..(15): LNA nucleoside
ccaattaaatacctg

SEQ ID NO: 569 - DNA, 15 bp, Artificial Sequence
  oligonucleotide - internucleotide bonds are phosphorothioate bonds (PS)
  modified_base (1)..(3): LNA nucleoside
  modified_base (12)..(15): LNA nucleoside
ccaattaaatacctg

SEQ ID NO: 570 - DNA, 15 bp, Artificial Sequence
  oligonucleotide - internucleotide bonds are phosphorothioate bonds (PS)
  modified_base (1)..(2): LNA nucleoside
  modified_base (12)..(15): LNA nucleoside
ccaattaaatacctg

SEQ ID NO: 571 - DNA, 14 bp, Artificial Sequence
  oligonucleotide - internucleotide bonds are phosphorothioate bonds (PS)
  modified_base (1)..(4): LNA nucleoside
  modified_base (13)..(14): LNA nucleoside
ggtggttacaaaag

SEQ ID NO: 572 - DNA, 14 bp, Artificial Sequence
  oligonucleotide - internucleotide bonds are phosphorothioate bonds (PS)
  modified_base (1)..(4): LNA nucleoside
  modified_base (12)..(14): LNA nucleoside
ggtggttacaaaag

SEQ ID NO: 573 - DNA, 14 bp, Artificial Sequence
  oligonucleotide - internucleotide bonds are phosphorothioate bonds (PS)
  modified_base (1)..(4): LNA nucleoside
  modified_base (11)..(14): LNA nucleoside
ggtggttacaaaag

SEQ ID NO: 574 - DNA, 17 bp, Artificial Sequence
  oligonucleotide - internucleotide bonds are phosphorothioate bonds (PS)
  modified_base (1)..(3): LNA nucleoside
  modified_base (14)..(17): LNA nucleoside
atttcttgtatttttaa

SEQ ID NO: 575 - DNA, 17 bp, Artificial Sequence
  oligonucleotide - internucleotide bonds are phosphorothioate bonds (PS)
  modified_base (1)..(4): LNA nucleoside
  modified_base (14)..(17): LNA nucleoside
atttcttgtatttttaa

SEQ ID NO: 576 - DNA, 17 bp, Artificial Sequence
  oligonucleotide - internucleotide bonds are phosphorothioate bonds (PS)
  modified_base (1)..(4): LNA nucleoside
  modified_base (15)..(17): LNA nucleoside
atttcttgtatttttaa

SEQ ID NO: 577 - DNA, 18 bp, Artificial Sequence
  oligonucleotide - internucleotide bonds are phosphorothioate bonds (PS)
  modified_base (1)..(3): LNA nucleoside
  modified_base (15)..(18): LNA nucleoside
aatttcttgtatttttaa

SEQ ID NO: 578 - DNA, 18 bp, Artificial Sequence
  oligonucleotide - internucleotide bonds are phosphorothioate bonds (PS)
  modified_base (1)..(4): LNA nucleoside
  modified_base (16)..(18): LNA nucleoside
aatttcttgtatttttaa

SEQ ID NO: 579 - DNA, 18 bp, Artificial Sequence
  oligonucleotide - internucleotide bonds are phosphorothioate bonds (PS)
  modified_base (1)..(4): LNA nucleoside
  modified_base (15)..(18): LNA nucleoside
aatttcttgtatttttaa

SEQ ID NO: 580 - DNA, 14 bp, Artificial Sequence
  oligonucleotide - internucleotide bonds are phosphorothioate bonds (PS)
  modified_base (1)..(4): LNA nucleoside
  modified_base (11)..(14): LNA nucleoside
ttgagaggctcttt

SEQ ID NO: 581 - DNA, 14 bp, Artificial Sequence
  oligonucleotide - internucleotide bonds are phosphorothioate bonds (PS)
  modified_base (1)..(4): LNA nucleoside
  modified_base (13)..(14): LNA nucleoside
ttgagaggctcttt

SEQ ID NO: 582 - DNA, 14 bp, Artificial Sequence
  oligonucleotide - internucleotide bonds are phosphorothioate bonds (PS)
  modified_base (1)..(4): LNA nucleoside
  modified_base (12)..(14): LNA nucleoside
ttgagaggctcttt

SEQ ID NO: 583 - DNA, 17 bp, Artificial Sequence
  oligonucleotide - internucleotide bonds are phosphorothioate bonds (PS)
  modified_base (1)..(2): LNA nucleoside
  modified_base (15)..(17): LNA nucleoside
taggatttccttccttt

SEQ ID NO: 584 - DNA, 17 bp, Artificial Sequence
  oligonucleotide - internucleotide bonds are phosphorothioate bonds (PS)
  modified_base (1)..(2): LNA nucleoside
  modified_base (16)..(17): LNA nucleoside
taggatttccttccttt

SEQ ID NO: 585 - DNA, 17 bp, Artificial Sequence
  oligonucleotide - internucleotide bonds are phosphorothioate bonds (PS)
  modified_base (1)..(4): LNA nucleoside
  modified_base (15)..(17): LNA nucleoside
taggatttccttccttt

SEQ ID NO: 586 - DNA, 18 bp, Artificial Sequence
  oligonucleotide - internucleotide bonds are phosphorothioate bonds (PS)
  modified_base (1)..(2): LNA nucleoside
  modified_base (16)..(18): LNA nucleoside
ataggatttccttccttt

SEQ ID NO: 587 - DNA, 18 bp, Artificial Sequence
  oligonucleotide - internucleotide bonds are phosphorothioate bonds (PS)
  modified_base (1)..(4): LNA nucleoside
  modified_base (17)..(18): LNA nucleoside
ataggatttccttccttt

SEQ ID NO: 588 - DNA, 18 bp, Artificial Sequence
  oligonucleotide - internucleotide bonds are phosphorothioate bonds (PS)
  modified_base (1)..(2): LNA nucleoside
  modified_base (17)..(18): LNA nucleoside
ataggatttccttccttt

SEQ ID NO: 589 - DNA, 19 bp, Artificial Sequence
  oligonucleotide - internucleotide bonds are phosphorothioate bonds (PS)
  modified_base (1)..(2): LNA nucleoside
  modified_base (17)..(19): LNA nucleoside
gataggatttccttccttt

SEQ ID NO: 590 - DNA, 19 bp, Artificial Sequence
  oligonucleotide - internucleotide bonds are phosphorothioate bonds (PS)
  modified_base (1)..(2): LNA nucleoside
  modified_base (18)..(19): LNA nucleoside
gataggatttccttccttt

SEQ ID NO: 591 - DNA, 19 bp, Artificial Sequence
  oligonucleotide - internucleotide bonds are phosphorothioate bonds (PS)
  modified_base (1)..(3): LNA nucleoside
  modified_base (18)..(19): LNA nucleoside
gataggatttccttccttt

SEQ ID NO: 592 - DNA, 20 bp, Artificial Sequence
  oligonucleotide - internucleotide bonds are phosphorothioate bonds (PS)
  modified_base (1)..(3): LNA nucleoside
  modified_base (19)..(20): LNA nucleoside
tgataggatttccttccttt

SEQ ID NO: 593 - DNA, 20 bp, Artificial Sequence
  oligonucleotide - internucleotide bonds are phosphorothioate bonds (PS)
  modified_base (1)..(2): LNA nucleoside
  modified_base (19)..(20): LNA nucleoside
tgataggatttccttccttt

SEQ ID NO: 594 - DNA, 20 bp, Artificial Sequence
  oligonucleotide - internucleotide bonds are phosphorothioate bonds (PS)
  modified_base (1)..(2): LNA nucleoside
  modified_base (18)..(20): LNA nucleoside
tgataggatttccttccttt

SEQ ID NO: 595 - DNA, 15 bp, Artificial Sequence
  oligonucleotide - internucleotide bonds are phosphorothioate bonds (PS)
  modified_base (1)..(4): LNA nucleoside
  modified_base (13)..(15): LNA nucleoside
catatgataggattt

SEQ ID NO: 596 - DNA, 15 bp, Artificial Sequence
  oligonucleotide - internucleotide bonds are phosphorothioate bonds (PS)
  modified_base (1)..(4): LNA nucleoside
  modified_base (12)..(15): LNA nucleoside
catatgataggattt

SEQ ID NO: 597 - DNA, 15 bp, Artificial Sequence
  oligonucleotide - internucleotide bonds are phosphorothioate bonds (PS)
  modified_base (1)..(3): LNA nucleoside
  modified_base (12)..(15): LNA nucleoside
catatgataggattt

SEQ ID NO: 598 - DNA, 16 bp, Artificial Sequence
  oligonucleotide - internucleotide bonds are phosphorothioate bonds (PS)
  modified_base (1)..(4): LNA nucleoside
  modified_base (13)..(16): LNA nucleoside
gcatatgataggattt

SEQ ID NO: 599 - DNA, 16 bp, Artificial Sequence
  oligonucleotide - internucleotide bonds are phosphorothioate bonds (PS)
  modified_base (1)..(3): LNA nucleoside
  modified_base (14)..(16): LNA nucleoside
gcatatgataggattt

SEQ ID NO: 600 - DNA, 16 bp, Artificial Sequence
  oligonucleotide - internucleotide bonds are phosphorothioate bonds (PS)
  modified_base (1)..(4): LNA nucleoside
  modified_base (14)..(16): LNA nucleoside
gcatatgataggattt

SEQ ID NO: 601 - DNA, 17 bp, Artificial Sequence
  oligonucleotide - internucleotide bonds are phosphorothioate bonds (PS)
  modified_base (1)..(3): LNA nucleoside
  modified_base (16)..(17): LNA nucleoside
agcatatgataggattt

SEQ ID NO: 602 - DNA, 17 bp, Artificial Sequence
  oligonucleotide - internucleotide bonds are phosphorothioate bonds (PS)
  modified_base (1)..(4): LNA nucleoside
  modified_base (14)..(17): LNA nucleoside
agcatatgataggattt

SEQ ID NO: 603 - DNA, 17 bp, Artificial Sequence
  oligonucleotide - internucleotide bonds are phosphorothioate bonds (PS)
  modified_base (1)..(4): LNA nucleoside
  modified_base (15)..(17): LNA nucleoside
agcatatgataggattt

SEQ ID NO: 604 - DNA, 18 bp, Artificial Sequence
  oligonucleotide - internucleotide bonds are phosphorothioate bonds (PS)
  modified_base (1)..(4): LNA nucleoside
  modified_base (16)..(18): LNA nucleoside
tagcatatgataggattt

SEQ ID NO: 605 - DNA, 18 bp, Artificial Sequence
  oligonucleotide - internucleotide bonds are phosphorothioate bonds (PS)
  modified_base (1)..(3): LNA nucleoside
  modified_base (17)..(18): LNA nucleoside
tagcatatgataggattt

SEQ ID NO: 606 - DNA, 18 bp, Artificial Sequence
  oligonucleotide - internucleotide bonds are phosphorothioate bonds (PS)
  modified_base (1)..(4): LNA nucleoside
  modified_base (15)..(18): LNA nucleoside
tagcatatgataggattt

SEQ ID NO: 607 - DNA, 17 bp, Artificial Sequence
  oligonucleotide - internucleotide bonds are phosphorothioate bonds (PS)
  modified_base (1)..(2): LNA nucleoside
  modified_base (15)..(17): LNA nucleoside
tatgataggatttcctt

SEQ ID NO: 608 - DNA, 17 bp, Artificial Sequence
  oligonucleotide - internucleotide bonds are phosphorothioate bonds (PS)
  modified_base (1)..(4): LNA nucleoside
  modified_base (15)..(17): LNA nucleoside
tatgataggatttcctt

SEQ ID NO: 609 - DNA, 17 bp, Artificial Sequence
  oligonucleotide - internucleotide bonds are phosphorothioate bonds (PS)
  modified_base (1)..(4): LNA nucleoside
  modified_base (14)..(17): LNA nucleoside
tatgataggatttcctt

SEQ ID NO: 610 - DNA, 18 bp, Artificial Sequence
  oligonucleotide - internucleotide bonds are phosphorothioate bonds (PS)
  modified_base (1)..(2): LNA nucleoside
  modified_base (15)..(18): LNA nucleoside
atatgataggatttcctt

SEQ ID NO: 611 - DNA, 18 bp, Artificial Sequence
  oligonucleotide - internucleotide bonds are phosphorothioate bonds (PS)
  modified_base (1)..(3): LNA nucleoside
  modified_base (17)..(18): LNA nucleoside
atatgataggatttcctt

SEQ ID NO: 612 - DNA, 18 bp, Artificial Sequence
  oligonucleotide - internucleotide bonds are phosphorothioate bonds (PS)
  modified_base (1)..(4): LNA nucleoside
  modified_base (15)..(18): LNA nucleoside
atatgataggatttcctt

SEQ ID NO: 613 - DNA, 19 bp, Artificial Sequence
  oligonucleotide - internucleotide bonds are phosphorothioate bonds (PS)
  modified_base (1)..(4): LNA nucleoside
  modified_base (17)..(19): LNA nucleoside
catatgataggatttcctt

SEQ ID NO: 614 - DNA, 19 bp, Artificial Sequence
  oligonucleotide - internucleotide bonds are phosphorothioate bonds (PS)
  modified_base (1)..(3): LNA nucleoside
  modified_base (18)..(19): LNA nucleoside
catatgataggatttcctt

SEQ ID NO: 615 - DNA, 19 bp, Artificial Sequence
  oligonucleotide - internucleotide bonds are phosphorothioate bonds (PS)
  modified_base (1)..(2): LNA nucleoside
  modified_base (18)..(19): LNA nucleoside
catatgataggatttcctt

SEQ ID NO: 616 - DNA, 20 bp, Artificial Sequence
  oligonucleotide - internucleotide bonds are phosphorothioate bonds (PS)
  modified_base (1)..(2): LNA nucleoside
  modified_base (19)..(20): LNA nucleoside
gcatatgataggatttcctt

SEQ ID NO: 617 - DNA, 20 bp, Artificial Sequence
  oligonucleotide - internucleotide bonds are phosphorothioate bonds (PS)
  modified_base (1)..(3): LNA nucleoside
  modified_base (19)..(20): LNA nucleoside
gcatatgataggatttcctt

SEQ ID NO: 618 - DNA, 20 bp, Artificial Sequence
  oligonucleotide - internucleotide bonds are phosphorothioate bonds (PS)
  modified_base (1)..(2): LNA nucleoside
  modified_base (18)..(20): LNA nucleoside
gcatatgataggatttcctt

SEQ ID NO: 619 - DNA, 16 bp, Artificial Sequence
  oligonucleotide - internucleotide bonds are phosphorothioate bonds (PS)
  modified_base (1)..(3): LNA nucleoside
  modified_base (15)..(16): LNA nucleoside
taggatttccttcctt

SEQ ID NO: 620 - DNA, 16 bp, Artificial Sequence
  oligonucleotide - internucleotide bonds are phosphorothioate bonds (PS)
  modified_base (1)..(4): LNA nucleoside
  modified_base (14)..(16): LNA nucleoside
taggatttccttcctt

SEQ ID NO: 621 - DNA, 16 bp, Artificial Sequence
  oligonucleotide - internucleotide bonds are phosphorothioate bonds (PS)
  modified_base (1)..(2): LNA nucleoside
  modified_base (15)..(16): LNA nucleoside
taggatttccttcctt

SEQ ID NO: 622 - DNA, 17 bp, Artificial Sequence
  oligonucleotide - internucleotide bonds are phosphorothioate bonds (PS)
  modified_base (1)..(2): LNA nucleoside
  modified_base (14)..(17): LNA nucleoside
ataggatttccttcctt

SEQ ID NO: 623 - DNA, 17 bp, Artificial Sequence
  oligonucleotide - internucleotide bonds are phosphorothioate bonds (PS)
  modified_base (1)..(2): LNA nucleoside
  modified_base (16)..(17): LNA nucleoside
ataggatttccttcctt

SEQ ID NO: 624 - DNA, 17 bp, Artificial Sequence
  oligonucleotide - internucleotide bonds are phosphorothioate bonds (PS)
  modified_base (1)..(2): LNA nucleoside
  modified_base (15)..(17): LNA nucleoside
ataggatttccttcctt

SEQ ID NO: 625 - DNA, 18 bp, Artificial Sequence
  oligonucleotide - internucleotide bonds are phosphorothioate bonds (PS)
  modified_base (1)..(2): LNA nucleoside
  modified_base (17)..(18): LNA nucleoside
gataggatttccttcctt

SEQ ID NO: 626 - DNA, 18 bp, Artificial Sequence
  oligonucleotide - internucleotide bonds are phosphorothioate bonds (PS)
  modified_base (1)..(2): LNA nucleoside
  modified_base (16)..(18): LNA nucleoside
gataggatttccttcctt

SEQ ID NO: 627 - DNA, 18 bp, Artificial Sequence
  oligonucleotide - internucleotide bonds are phosphorothioate bonds (PS)
  modified_base (1)..(3): LNA nucleoside
  modified_base (16)..(18): LNA nucleoside
gataggatttccttcctt

SEQ ID NO: 628 - DNA, 19 bp, Artificial Sequence
  oligonucleotide - internucleotide bonds are phosphorothioate bonds (PS)
  modified_base (1)..(2): LNA nucleoside
  modified_base (17)..(19): LNA nucleoside
tgataggatttccttcctt

SEQ ID NO: 629 - DNA, 19 bp, Artificial Sequence
  oligonucleotide - internucleotide bonds are phosphorothioate bonds (PS)
  modified_base (1)..(3): LNA nucleoside
  modified_base (18)..(19): LNA nucleoside
tgataggatttccttcctt

SEQ ID NO: 630 - DNA, 19 bp, Artificial Sequence
  oligonucleotide - internucleotide bonds are phosphorothioate bonds (PS)
  modified_base (1)..(2): LNA nucleoside
  modified_base (18)..(19): LNA nucleoside
tgataggatttccttcctt

SEQ ID NO: 631 - DNA, 20 bp, Artificial Sequence
  oligonucleotide - internucleotide bonds are phosphorothioate bonds (PS)
  modified_base (1)..(2): LNA nucleoside
  modified_base (18)..(20): LNA nucleoside
atgataggatttccttcctt

SEQ ID NO: 632 - DNA, 20 bp, Artificial Sequence
  oligonucleotide - internucleotide bonds are phosphorothioate bonds (PS)
  modified_base (1)..(2): LNA nucleoside
  modified_base (19)..(20): LNA nucleoside
atgataggatttccttcctt

SEQ ID NO: 633 - DNA, 20 bp, Artificial Sequence
  oligonucleotide - internucleotide bonds are phosphorothioate bonds (PS)
  modified_base (1)..(3): LNA nucleoside
  modified_base (19)..(20): LNA nucleoside
atgataggatttccttcctt

SEQ ID NO: 634 - DNA, 15 bp, Artificial Sequence
  oligonucleotide - internucleotide bonds are phosphorothioate bonds (PS)
  modified_base (1)..(3): LNA nucleoside
  modified_base (12)..(15): LNA nucleoside
gcatatgataggatt

SEQ ID NO: 635 - DNA, 15 bp, Artificial Sequence
  oligonucleotide - internucleotide bonds are phosphorothioate bonds (PS)
  modified_base (1)..(4): LNA nucleoside
  modified_base (12)..(15): LNA nucleoside
gcatatgataggatt

SEQ ID NO: 636 - DNA, 15 bp, Artificial Sequence
  oligonucleotide - internucleotide bonds are phosphorothioate bonds (PS)
  modified_base (1)..(2): LNA nucleoside
  modified_base (12)..(15): LNA nucleoside
gcatatgataggatt

SEQ ID NO: 637 - DNA, 16 bp, Artificial Sequence
  oligonucleotide - internucleotide bonds are phosphorothioate bonds (PS)
  modified_base (1)..(3): LNA nucleoside
  modified_base (13)..(16): LNA nucleoside
agcatatgataggatt

SEQ ID NO: 638 - DNA, 16 bp, Artificial Sequence
  oligonucleotide - internucleotide bonds are phosphorothioate bonds (PS)
  modified_base (1)..(2): LNA nucleoside
  modified_base (13)..(16): LNA nucleoside
agcatatgataggatt

SEQ ID NO: 639 - DNA, 16 bp, Artificial Sequence
  oligonucleotide - internucleotide bonds are phosphorothioate bonds (PS)
  modified_base (1)..(4): LNA nucleoside
  modified_base (13)..(16): LNA nucleoside
agcatatgataggatt

SEQ ID NO: 640 - DNA, 17 bp, Artificial Sequence
  oligonucleotide - internucleotide bonds are phosphorothioate bonds (PS)
  modified_base (1)..(4): LNA nucleoside
  modified_base (15)..(17): LNA nucleoside
tagcatatgataggatt

SEQ ID NO: 641 - DNA, 17 bp, Artificial Sequence
  oligonucleotide - internucleotide bonds are phosphorothioate bonds (PS)
  modified_base (1)..(3): LNA nucleoside
  modified_base (15)..(17): LNA nucleoside
tagcatatgataggatt

SEQ ID NO: 642 - DNA, 17 bp, Artificial Sequence
  oligonucleotide - internucleotide bonds are phosphorothioate bonds (PS)
  modified_base (1)..(4): LNA nucleoside
  modified_base (14)..(17): LNA nucleoside
tagcatatgataggatt

SEQ ID NO: 643 - DNA, 19 bp, Artificial Sequence
  oligonucleotide - internucleotide bonds are phosphorothioate bonds (PS)
  modified_base (1)..(4): LNA nucleoside
  modified_base (16)..(19): LNA nucleoside
tttgcaaatctgaaactct

SEQ ID NO: 644 - DNA, 19 bp, Artificial Sequence
  oligonucleotide - internucleotide bonds are phosphorothioate bonds (PS)
  modified_base (1)..(4): LNA nucleoside
  modified_base (17)..(19): LNA nucleoside
tttgcaaatctgaaactct

SEQ ID NO: 645 - DNA, 19 bp, Artificial Sequence
  oligonucleotide - internucleotide bonds are phosphorothioate bonds (PS)
  modified_base (1)..(2): LNA nucleoside
  modified_base (17)..(19): LNA nucleoside
tttgcaaatctgaaactct

SEQ ID NO: 646 - DNA, 20 bp, Artificial Sequence
  oligonucleotide - internucleotide bonds are phosphorothioate bonds (PS)
  modified_base (1)..(2): LNA nucleoside
  modified_base (17)..(20): LNA nucleoside
ttttgcaaatctgaaactct

SEQ ID NO: 647 - DNA, 20 bp, Artificial Sequence
  oligonucleotide - internucleotide bonds are phosphorothioate bonds (PS)
  modified_base (1)..(2): LNA nucleoside
  modified_base (19)..(20): LNA nucleoside
ttttgcaaatctgaaactct

SEQ ID NO: 648 - DNA, 20 bp, Artificial Sequence
  oligonucleotide - internucleotide bonds are phosphorothioate bonds (PS)
  modified_base (1)..(4): LNA nucleoside
  modified_base (17)..(20): LNA nucleoside
ttttgcaaatctgaaactct

SEQ ID NO: 649 - DNA, 16 bp, Artificial Sequence
  oligonucleotide - internucleotide bonds are phosphorothioate bonds (PS)
  modified_base (1)..(4): LNA nucleoside
  modified_base (14)..(16): LNA nucleoside
ttcattttgcaaatct

SEQ ID NO: 650 - DNA, 16 bp, Artificial Sequence
  oligonucleotide - internucleotide bonds are phosphorothioate bonds (PS)
  modified_base (1)..(4): LNA nucleoside
  modified_base (13)..(16): LNA nucleoside
ttcattttgcaaatct

SEQ ID NO: 651 - DNA, 16 bp, Artificial Sequence
  oligonucleotide - internucleotide bonds are phosphorothioate bonds (PS)
  modified_base (1)..(3): LNA nucleoside
  modified_base (13)..(16): LNA nucleoside
ttcattttgcaaatct

SEQ ID NO: 652 - DNA, 17 bp, Artificial Sequence
  oligonucleotide - internucleotide bonds are phosphorothioate bonds (PS)
  modified_base (1)..(4): LNA nucleoside
  modified_base (14)..(17): LNA nucleoside
tttcattttgcaaatct

SEQ ID NO: 653 - DNA, 17 bp, Artificial Sequence
  oligonucleotide - internucleotide bonds are phosphorothioate bonds (PS)
  modified_base (1)..(4): LNA nucleoside
  modified_base (15)..(17): LNA nucleoside
tttcattttgcaaatct

SEQ ID NO: 654 - DNA, 17 bp, Artificial Sequence
  oligonucleotide - internucleotide bonds are phosphorothioate bonds (PS)
  modified_base (1)..(3): LNA nucleoside
  modified_base (14)..(17): LNA nucleoside
tttcattttgcaaatct

SEQ ID NO: 655 - DNA, 18 bp, Artificial Sequence
  oligonucleotide - internucleotide bonds are phosphorothioate bonds (PS)
  modified_base (1)..(4): LNA nucleoside
  modified_base (15)..(18): LNA nucleoside
ttttcattttgcaaatct

SEQ ID NO: 656 - DNA, 18 bp, Artificial Sequence
  oligonucleotide - internucleotide bonds are phosphorothioate bonds (PS)
  modified_base (1)..(4): LNA nucleoside
  modified_base (17)..(18): LNA nucleoside
ttttcattttgcaaatct

SEQ ID NO: 657 - DNA, 18 bp, Artificial Sequence
  oligonucleotide - internucleotide bonds are phosphorothioate bonds (PS)
  modified_base (1)..(3): LNA nucleoside
  modified_base (15)..(18): LNA nucleoside
ttttcattttgcaaatct

SEQ ID NO: 658 - DNA, 16 bp, Artificial Sequence
  oligonucleotide - internucleotide bonds are phosphorothioate bonds (PS)
  modified_base (1)..(3): LNA nucleoside
  modified_base (15)..(16): LNA nucleoside
tatgataggatttcct

SEQ ID NO: 659 - DNA, 16 bp, Artificial Sequence
  oligonucleotide - internucleotide bonds are phosphorothioate bonds (PS)
  modified_base (1)..(3): LNA nucleoside
  modified_base (13)..(16): LNA nucleoside
tatgataggatttcct

SEQ ID NO: 660 - DNA, 16 bp, Artificial Sequence
  oligonucleotide - internucleotide bonds are phosphorothioate bonds (PS)
  modified_base (1)..(4): LNA nucleoside
  modified_base (13)..(16): LNA nucleoside
tatgataggatttcct

SEQ ID NO: 661 - DNA, 17 bp, Artificial Sequence
  oligonucleotide - internucleotide bonds are phosphorothioate bonds (PS)
  modified_base (1)..(4): LNA nucleoside
  modified_base (14)..(17): LNA nucleoside
atatgataggatttcct

SEQ ID NO: 662 - DNA, 17 bp, Artificial Sequence
  oligonucleotide - internucleotide bonds are phosphorothioate bonds (PS)
  modified_base (1)..(3): LNA nucleoside
  modified_base (15)..(17): LNA nucleoside
atatgataggatttcct

SEQ ID NO: 663 - DNA, 17 bp, Artificial Sequence
  oligonucleotide - internucleotide bonds are phosphorothioate bonds (PS)
  modified_base (1)..(3): LNA nucleoside
  modified_base (16)..(17): LNA nucleoside
atatgataggatttcct

SEQ ID NO: 664 - DNA, 18 bp, Artificial Sequence
  oligonucleotide - internucleotide bonds are phosphorothioate bonds (PS)
  modified_base (1)..(2): LNA nucleoside
  modified_base (17)..(18): LNA nucleoside
catatgataggatttcct

SEQ ID NO: 665 - DNA, 18 bp, Artificial Sequence
  oligonucleotide - internucleotide bonds are phosphorothioate bonds (PS)
  modified_base (1)..(4): LNA nucleoside
  modified_base (16)..(18): LNA nucleoside
catatgataggatttcct

SEQ ID NO: 666 - DNA, 18 bp, Artificial Sequence
  oligonucleotide - internucleotide bonds are phosphorothioate bonds (PS)
  modified_base (1)..(2): LNA nucleoside
  modified_base (16)..(18): LNA nucleoside
catatgataggatttcct

SEQ ID NO: 667 - DNA, 19 bp, Artificial Sequence
  oligonucleotide - internucleotide bonds are phosphorothioate bonds (PS)
  modified_base (1)..(3): LNA nucleoside
  modified_base (18)..(19): LNA nucleoside
gcatatgataggatttcct

SEQ ID NO: 668 - DNA, 19 bp, Artificial Sequence
  oligonucleotide - internucleotide bonds are phosphorothioate bonds (PS)
  modified_base (1)..(2): LNA nucleoside
  modified_base (18)..(19): LNA nucleoside
gcatatgataggatttcct

SEQ ID NO: 669 - DNA, 19 bp, Artificial Sequence
  oligonucleotide - internucleotide bonds are phosphorothioate bonds (PS)
  modified_base (1)..(2): LNA nucleoside
  modified_base (17)..(19): LNA nucleoside
gcatatgataggatttcct

SEQ ID NO: 670 - DNA, 20 bp, Artificial Sequence
  oligonucleotide - internucleotide bonds are phosphorothioate bonds (PS)
  modified_base (1)..(2): LNA nucleoside
  modified_base (18)..(20): LNA nucleoside
agcatatgataggatttcct

SEQ ID NO: 671 - DNA, 20 bp, Artificial Sequence
  oligonucleotide - internucleotide bonds are phosphorothioate bonds (PS)
  modified_base (1)..(2): LNA nucleoside
  modified_base (19)..(20): LNA nucleoside
agcatatgataggatttcct

SEQ ID NO: 672 - DNA, 20 bp, Artificial Sequence
  oligonucleotide - internucleotide bonds are phosphorothioate bonds (PS)
  modified_base (1)..(3): LNA nucleoside
  modified_base (19)..(20): LNA nucleoside
agcatatgataggatttcct

SEQ ID NO: 673 - DNA, 15 bp, Artificial Sequence
  oligonucleotide - internucleotide bonds are phosphorothioate bonds (PS)
  modified_base (1)..(2): LNA nucleoside
  modified_base (14)..(15): LNA nucleoside
taggatttccttcct

SEQ ID NO: 674 - DNA, 15 bp, Artificial Sequence
  oligonucleotide - internucleotide bonds are phosphorothioate bonds (PS)
  modified_base (1)..(3): LNA nucleoside
  modified_base (12)..(15): LNA nucleoside
taggatttccttcct

SEQ ID NO: 675 - DNA, 15 bp, Artificial Sequence
  oligonucleotide - internucleotide bonds are phosphorothioate bonds (PS)
  modified_base (1)..(3): LNA nucleoside
  modified_base (14)..(15): LNA nucleoside
taggatttccttcct

SEQ ID NO: 676 - DNA, 16 bp, Artificial Sequence
  oligonucleotide - internucleotide bonds are phosphorothioate bonds (PS)
  modified_base (1)..(2): LNA nucleoside
  modified_base (15)..(16): LNA nucleoside
ataggatttccttcct

SEQ ID NO: 677 - DNA, 16 bp, Artificial Sequence
  oligonucleotide - internucleotide bonds are phosphorothioate bonds (PS)
  modified_base (1)..(3): LNA nucleoside
  modified_base (15)..(16): LNA nucleoside
ataggatttccttcct

SEQ ID NO: 678 - DNA, 16 bp, Artificial Sequence
  oligonucleotide - internucleotide bonds are phosphorothioate bonds (PS)
  modified_base (1)..(3): LNA nucleoside
  modified_base (13)..(16): LNA nucleoside
ataggatttccttcct

SEQ ID NO: 679 - DNA, 17 bp, Artificial Sequence
  oligonucleotide - internucleotide bonds are phosphorothioate bonds (PS)
  modified_base (1)..(2): LNA nucleoside
  modified_base (16)..(17): LNA nucleoside
gataggatttccttcct

SEQ ID NO: 680 - DNA, 17 bp, Artificial Sequence
  oligonucleotide - internucleotide bonds are phosphorothioate bonds (PS)
  modified_base (1)..(4): LNA nucleoside
  modified_base (16)..(17): LNA nucleoside
gataggatttccttcct

SEQ ID NO: 681 - DNA, 17 bp, Artificial Sequence
  oligonucleotide - internucleotide bonds are phosphorothioate bonds (PS)
  modified_base (1)..(3): LNA nucleoside
  modified_base (16)..(17): LNA nucleoside
gataggatttccttcct

SEQ ID NO: 682 - DNA, 18 bp, Artificial Sequence
  oligonucleotide - internucleotide bonds are phosphorothioate bonds (PS)
  modified_base (1)..(3): LNA nucleoside
  modified_base (17)..(18): LNA nucleoside
tgataggatttccttcct

SEQ ID NO: 683 - DNA, 18 bp, Artificial Sequence
  oligonucleotide - internucleotide bonds are phosphorothioate bonds (PS)
  modified_base (1)..(2): LNA nucleoside
  modified_base (16)..(18): LNA nucleoside
tgataggatttccttcct

SEQ ID NO: 684 - DNA, 18 bp, Artificial Sequence
  oligonucleotide - internucleotide bonds are phosphorothioate bonds (PS)
  modified_base (1)..(2): LNA nucleoside
  modified_base (17)..(18): LNA nucleoside
tgataggatttccttcct

SEQ ID NO: 685 - DNA, 19 bp, Artificial Sequence
  oligonucleotide - internucleotide bonds are phosphorothioate bonds (PS)
  modified_base (1)..(3): LNA nucleoside
  modified_base (18)..(19): LNA nucleoside
atgataggatttccttcct

SEQ ID NO: 686 - DNA, 19 bp, Artificial Sequence
  oligonucleotide - internucleotide bonds are phosphorothioate bonds (PS)
  modified_base (1)..(2): LNA nucleoside
  modified_base (17)..(19): LNA nucleoside
atgataggatttccttcct

SEQ ID NO: 687 - DNA, 19 bp, Artificial Sequence
  oligonucleotide - internucleotide bonds are phosphorothioate bonds (PS)
  modified_base (1)..(2): LNA nucleoside
  modified_base (18)..(19): LNA nucleoside
atgataggatttccttcct

SEQ ID NO: 688 - DNA, 20 bp, Artificial Sequence
  oligonucleotide - internucleotide bonds are phosphorothioate bonds (PS)
  modified_base (1)..(2): LNA nucleoside
  modified_base (19)..(20): LNA nucleoside
tatgataggatttccttcct

SEQ ID NO: 689 - DNA, 20 bp, Artificial Sequence
  oligonucleotide - internucleotide bonds are phosphorothioate bonds (PS)
  modified_base (1)..(3): LNA nucleoside
  modified_base (19)..(20): LNA nucleoside
tatgataggatttccttcct

SEQ ID NO: 690 - DNA, 20 bp, Artificial Sequence
  oligonucleotide - internucleotide bonds are phosphorothioate bonds (PS)
  modified_base (1)..(2): LNA nucleoside
  modified_base (18)..(20): LNA nucleoside
tatgataggatttccttcct

SEQ ID NO: 691 - DNA, 17 bp, Artificial Sequence
  oligonucleotide - internucleotide bonds are phosphorothioate bonds (PS)
  modified_base (1)..(3): LNA nucleoside
  modified_base (14)..(17): LNA nucleoside
tttgcaaatctgaaact

SEQ ID NO: 692 - DNA, 17 bp, Artificial Sequence
  oligonucleotide - internucleotide bonds are phosphorothioate bonds (PS)
  modified_base (1)..(4): LNA nucleoside
  modified_base (15)..(17): LNA nucleoside
tttgcaaatctgaaact

SEQ ID NO: 693 - DNA, 17 bp, Artificial Sequence
  oligonucleotide - internucleotide bonds are phosphorothioate bonds (PS)
  modified_base (1)..(4): LNA nucleoside
  modified_base (14)..(17): LNA nucleoside
tttgcaaatctgaaact

SEQ ID NO: 694 - DNA, 18 bp, Artificial Sequence
  oligonucleotide - internucleotide bonds are phosphorothioate bonds (PS)
  modified_base (1)..(4): LNA nucleoside
  modified_base (15)..(18): LNA nucleoside
ttttgcaaatctgaaact

SEQ ID NO: 695 - DNA, 18 bp, Artificial Sequence
  oligonucleotide - internucleotide bonds are phosphorothioate bonds (PS)
  modified_base (1)..(3): LNA nucleoside
  modified_base (15)..(18): LNA nucleoside
ttttgcaaatctgaaact

SEQ ID NO: 696 - DNA, 18 bp, Artificial Sequence
  oligonucleotide - internucleotide bonds are phosphorothioate bonds (PS)
  modified_base (1)..(4): LNA nucleoside
  modified_base (16)..(18): LNA nucleoside
ttttgcaaatctgaaact

SEQ ID NO: 697 - DNA, 19 bp, Artificial Sequence
  oligonucleotide - internucleotide bonds are phosphorothioate bonds (PS)
  modified_base (1)..(4): LNA nucleoside
  modified_base (16)..(19): LNA nucleoside
attttgcaaatctgaaact

SEQ ID NO: 698 - DNA, 19 bp, Artificial Sequence
  oligonucleotide - internucleotide bonds are phosphorothioate bonds (PS)
  modified_base (1)..(4): LNA nucleoside
  modified_base (17)..(19): LNA nucleoside
attttgcaaatctgaaact

SEQ ID NO: 699 - DNA, 19 bp, Artificial Sequence
  oligonucleotide - internucleotide bonds are phosphorothioate bonds (PS)
  modified_base (1)..(4): LNA nucleoside
  modified_base (18)..(19): LNA nucleoside
attttgcaaatctgaaact

SEQ ID NO: 700 - DNA, 20 bp, Artificial Sequence
  oligonucleotide - internucleotide bonds are phosphorothioate bonds (PS)
  modified_base (1)..(4): LNA nucleoside
  modified_base (17)..(20): LNA nucleoside
cattttgcaaatctgaaact

SEQ ID NO: 701 - DNA, 20 bp, Artificial Sequence
  oligonucleotide - internucleotide bonds are phosphorothioate bonds (PS)
  modified_base (1)..(2): LNA nucleoside
  modified_base (19)..(20): LNA nucleoside
cattttgcaaatctgaaact

SEQ ID NO: 702 - DNA, 20 bp, Artificial Sequence
  oligonucleotide - internucleotide bonds are phosphorothioate bonds (PS)
  modified_base (1)..(3): LNA nucleoside
  modified_base (17)..(20): LNA nucleoside
cattttgcaaatctgaaact

SEQ ID NO: 703 - DNA, 16 bp, Artificial Sequence
  oligonucleotide - internucleotide bonds are phosphorothioate bonds (PS)
  modified_base (1)..(4): LNA nucleoside
  modified_base (13)..(16): LNA nucleoside
aaatctgaaactctat

SEQ ID NO: 704 - DNA, 16 bp, Artificial Sequence
  oligonucleotide - internucleotide bonds are phosphorothioate bonds (PS)
  modified_base (1)..(3): LNA nucleoside
  modified_base (13)..(16): LNA nucleoside
aaatctgaaactctat

SEQ ID NO: 705 - DNA, 16 bp, Artificial Sequence
  oligonucleotide - internucleotide bonds are phosphorothioate bonds (PS)
  modified_base (1)..(4): LNA nucleoside
  modified_base (14)..(16): LNA nucleoside
aaatctgaaactctat

SEQ ID NO: 706 - DNA, 17 bp, Artificial Sequence
  oligonucleotide - internucleotide bonds are phosphorothioate bonds (PS)
  modified_base (1)..(2): LNA nucleoside
  modified_base (14)..(17): LNA nucleoside
caaatctgaaactctat

SEQ ID NO: 707 - DNA, 17 bp, Artificial Sequence
  oligonucleotide - internucleotide bonds are phosphorothioate bonds (PS)
  modified_base (1)..(3): LNA nucleoside
  modified_base (14)..(17): LNA nucleoside
caaatctgaaactctat

SEQ ID NO: 708 - DNA, 17 bp, Artificial Sequence
  oligonucleotide - internucleotide bonds are phosphorothioate bonds (PS)
  modified_base (1)..(4): LNA nucleoside
  modified_base (14)..(17): LNA nucleoside
caaatctgaaactctat

SEQ ID NO: 709 - DNA, 18 bp, Artificial Sequence
  oligonucleotide - internucleotide bonds are phosphorothioate bonds (PS)
  modified_base (1)..(3): LNA nucleoside
  modified_base (17)..(18): LNA nucleoside
gcaaatctgaaactctat

SEQ ID NO: 710 - DNA, 18 bp, Artificial Sequence
  oligonucleotide - internucleotide bonds are phosphorothioate bonds (PS)
  modified_base (1)..(4): LNA nucleoside
  modified_base (15)..(18): LNA nucleoside
gcaaatctgaaactctat

SEQ ID NO: 711 - DNA, 18 bp, Artificial Sequence
  oligonucleotide - internucleotide bonds are phosphorothioate bonds (PS)
  modified_base (1)..(4): LNA nucleoside
  modified_base (16)..(18): LNA nucleoside
gcaaatctgaaactctat

SEQ ID NO: 712 - DNA, 19 bp, Artificial Sequence
  oligonucleotide - internucleotide bonds are phosphorothioate bonds (PS)
  modified_base (1)..(4): LNA nucleoside
  modified_base (16)..(19): LNA nucleoside
tgcaaatctgaaactctat

SEQ ID NO: 713 - DNA, 19 bp, Artificial Sequence
  oligonucleotide - internucleotide bonds are phosphorothioate bonds (PS)
  modified_base (1)..(3): LNA nucleoside
  modified_base (17)..(19): LNA nucleoside
tgcaaatctgaaactctat

SEQ ID NO: 714 - DNA, 19 bp, Artificial Sequence
  oligonucleotide - internucleotide bonds are phosphorothioate bonds (PS)
  modified_base (1)..(2): LNA nucleoside
  modified_base (17)..(19): LNA nucleoside
tgcaaatctgaaactctat

SEQ ID NO: 715 - DNA, 20 bp, Artificial Sequence
  oligonucleotide - internucleotide bonds are phosphorothioate bonds (PS)
  modified_base (1)..(4): LNA nucleoside
  modified_base (17)..(20): LNA nucleoside
ttgcaaatctgaaactctat

SEQ ID NO: 716 - DNA, 20 bp, Artificial Sequence
  oligonucleotide - internucleotide bonds are phosphorothioate bonds (PS)
  modified_base (1)..(4): LNA nucleoside
  modified_base (19)..(20): LNA nucleoside
ttgcaaatctgaaactctat

SEQ ID NO: 717 - DNA, 20 bp, Artificial Sequence
  oligonucleotide - internucleotide bonds are phosphorothioate bonds (PS)
  modified_base (1)..(2): LNA nucleoside
  modified_base (19)..(20): LNA nucleoside
ttgcaaatctgaaactctat

SEQ ID NO: 718 - DNA, 14 bp, Artificial Sequence
  oligonucleotide - internucleotide bonds are phosphorothioate bonds (PS)
  modified_base (1)..(4): LNA nucleoside
  modified_base (11)..(14): LNA nucleoside
gcatatgataggat

SEQ ID NO: 719 - DNA, 14 bp, Artificial Sequence
  oligonucleotide - internucleotide bonds are phosphorothioate bonds (PS)
  modified_base (1)..(3): LNA nucleoside
  modified_base (11)..(14): LNA nucleoside
gcatatgataggat

SEQ ID NO: 720 - DNA, 14 bp, Artificial Sequence
  oligonucleotide - internucleotide bonds are phosphorothioate bonds (PS)
  modified_base (1)..(2): LNA nucleoside
  modified_base (11)..(14): LNA nucleoside
gcatatgataggat

SEQ ID NO: 721 - DNA, 15 bp, Artificial Sequence
  oligonucleotide - internucleotide bonds are phosphorothioate bonds (PS)
  modified_base (1)..(4): LNA nucleoside
  modified_base (14)..(15): LNA nucleoside
agcatatgataggat

SEQ ID NO: 722 - DNA, 15 bp, Artificial Sequence
  oligonucleotide - internucleotide bonds are phosphorothioate bonds (PS)
  modified_base (1)..(3): LNA nucleoside
  modified_base (12)..(15): LNA nucleoside
agcatatgataggat

SEQ ID NO: 723 - DNA, 15 bp, Artificial Sequence
  oligonucleotide - internucleotide bonds are phosphorothioate bonds (PS)
  modified_base (1)..(4): LNA nucleoside
  modified_base (12)..(15): LNA nucleoside
agcatatgataggat

SEQ ID NO: 724 - DNA, 16 bp, Artificial Sequence
  oligonucleotide - internucleotide bonds are phosphorothioate bonds (PS)
  modified_base (1)..(4): LNA nucleoside
  modified_base (13)..(16): LNA nucleoside
tagcatatgataggat

SEQ ID NO: 725 - DNA, 16 bp, Artificial Sequence
  oligonucleotide - internucleotide bonds are phosphorothioate bonds (PS)
  modified_base (1)..(4): LNA nucleoside
  modified_base (14)..(16): LNA nucleoside
tagcatatgataggat

SEQ ID NO: 726 - DNA, 16 bp, Artificial Sequence
  oligonucleotide - internucleotide bonds are phosphorothioate bonds (PS)
  modified_base (1)..(3): LNA nucleoside
  modified_base (14)..(16): LNA nucleoside
tagcatatgataggat

SEQ ID NO: 727 - DNA, 15 bp, Artificial Sequence
  oligonucleotide - internucleotide bonds are phosphorothioate bonds (PS)
  modified_base (1)..(3): LNA nucleoside
  modified_base (12)..(15): LNA nucleoside
cattttgcaaatctg

SEQ ID NO: 728 - DNA, 15 bp, Artificial Sequence
  oligonucleotide - internucleotide bonds are phosphorothioate bonds (PS)
  modified_base (1)..(4): LNA nucleoside
  modified_base (13)..(15): LNA nucleoside
cattttgcaaatctg

SEQ ID NO: 729 - DNA, 15 bp, Artificial Sequence
  oligonucleotide - internucleotide bonds are phosphorothioate bonds (PS)
  modified_base (1)..(4): LNA nucleoside
  modified_base (12)..(15): LNA nucleoside
cattttgcaaatctg

SEQ ID NO: 730 - DNA, 16 bp, Artificial Sequence
  oligonucleotide - internucleotide bonds are phosphorothioate bonds (PS)
  modified_base (1)..(4): LNA nucleoside
  modified_base (13)..(16): LNA nucleoside
tcattttgcaaatctg

SEQ ID NO: 731 - DNA, 16 bp, Artificial Sequence
  oligonucleotide - internucleotide bonds are phosphorothioate bonds (PS)
  modified_base (1)..(4): LNA nucleoside
  modified_base (14)..(16): LNA nucleoside
tcattttgcaaatctg

SEQ ID NO: 732 - DNA, 16 bp, Artificial Sequence
  oligonucleotide - internucleotide bonds are phosphorothioate bonds (PS)
  modified_base (1)..(3): LNA nucleoside
  modified_base (14)..(16): LNA nucleoside
tcattttgcaaatctg

SEQ ID NO: 733 - DNA, 17 bp, Artificial Sequence
  oligonucleotide - internucleotide bonds are phosphorothioate bonds (PS)
  modified_base (1)..(4): LNA nucleoside
  modified_base (15)..(17): LNA nucleoside
ttcattttgcaaatctg

SEQ ID NO: 734 - DNA, 17 bp, Artificial Sequence
  oligonucleotide - internucleotide bonds are phosphorothioate bonds (PS)
  modified_base (1)..(4): LNA nucleoside
  modified_base (14)..(17): LNA nucleoside
ttcattttgcaaatctg

SEQ ID NO: 735 - DNA, 17 bp, Artificial Sequence
  oligonucleotide - internucleotide bonds are phosphorothioate bonds (PS)
  modified_base (1)..(3): LNA nucleoside
  modified_base (15)..(17): LNA nucleoside
ttcattttgcaaatctg

SEQ ID NO: 736 - DNA, 18 bp, Artificial Sequence
  oligonucleotide - internucleotide bonds are phosphorothioate bonds (PS)
  modified_base (1)..(4): LNA nucleoside
  modified_base (17)..(18): LNA nucleoside
tttcattttgcaaatctg

SEQ ID NO: 737 - DNA, 18 bp, Artificial Sequence
  oligonucleotide - internucleotide bonds are phosphorothioate bonds (PS)
  modified_base (1)..(4): LNA nucleoside
  modified_base (15)..(18): LNA nucleoside
tttcattttgcaaatctg

SEQ ID NO: 738 - DNA, 18 bp, Artificial Sequence
  oligonucleotide - internucleotide bonds are phosphorothioate bonds (PS)
  modified_base (1)..(4): LNA nucleoside
  modified_base (16)..(18): LNA nucleoside
tttcattttgcaaatctg

SEQ ID NO: 739 - DNA, 19 bp, Artificial Sequence
  oligonucleotide - internucleotide bonds are phosphorothioate bonds (PS)
  modified_base (1)..(3): LNA nucleoside
  modified_base (16)..(19): LNA nucleoside
ttttcattttgcaaatctg

SEQ ID NO: 740 - DNA, 19 bp, Artificial Sequence
  oligonucleotide - internucleotide bonds are phosphorothioate bonds (PS)
  modified_base (1)..(3): LNA nucleoside
  modified_base (18)..(19): LNA nucleoside
ttttcattttgcaaatctg

SEQ ID NO: 741 - DNA, 19 bp, Artificial Sequence
  oligonucleotide - internucleotide bonds are phosphorothioate bonds (PS)
  modified_base (1)..(4): LNA nucleoside
  modified_base (16)..(19): LNA nucleoside
ttttcattttgcaaatctg

SEQ ID NO: 742 - DNA, 15 bp, Artificial Sequence
  oligonucleotide - internucleotide bonds are phosphorothioate bonds (PS)
  modified_base (1)..(3): LNA nucleoside
  modified_base (13)..(15): LNA nucleoside
ctcctttgttcactg

SEQ ID NO: 743 - DNA, 15 bp, Artificial Sequence
  oligonucleotide - internucleotide bonds are phosphorothioate bonds (PS)
  modified_base (1)..(2): LNA nucleoside
  modified_base (14)..(15): LNA nucleoside
ctcctttgttcactg

SEQ ID NO: 744 - DNA, 15 bp, Artificial Sequence
  oligonucleotide - internucleotide bonds are phosphorothioate bonds (PS)
  modified_base (1)..(4): LNA nucleoside
  modified_base (13)..(15): LNA nucleoside
ctcctttgttcactg

SEQ ID NO: 745 - DNA, 14 bp, Artificial Sequence
  oligonucleotide - internucleotide bonds are phosphorothioate bonds (PS)
  modified_base (1)..(3): LNA nucleoside
  modified_base (11)..(14): LNA nucleoside
tagcatatgatagg

SEQ ID NO: 746 - DNA, 14 bp, Artificial Sequence
  oligonucleotide - internucleotide bonds are phosphorothioate bonds (PS)
  modified_base (1)..(4): LNA nucleoside
  modified_base (11)..(14): LNA nucleoside
tagcatatgatagg

SEQ ID NO: 747 - DNA, 14 bp, Artificial Sequence
  oligonucleotide - internucleotide bonds are phosphorothioate bonds (PS)
  modified_base (1)..(4): LNA nucleoside
  modified_base (12)..(14): LNA nucleoside
tagcatatgatagg

SEQ ID NO: 748 - DNA, 14 bp, Artificial Sequence
  oligonucleotide - internucleotide bonds are phosphorothioate bonds (PS)
  modified_base (1)..(2): LNA nucleoside
  modified_base (11)..(14): LNA nucleoside
taggtgcttcttag

SEQ ID NO: 749 - DNA, 14 bp, Artificial Sequence
  oligonucleotide - internucleotide bonds are phosphorothioate bonds (PS)
  modified_base (1)..(4): LNA nucleoside
  modified_base (11)..(14): LNA nucleoside
taggtgcttcttag

SEQ ID NO: 750 - DNA, 14 bp, Artificial Sequence
  oligonucleotide - internucleotide bonds are phosphorothioate bonds (PS)
  modified_base (1)..(4): LNA nucleoside
  modified_base (12)..(14): LNA nucleoside
taggtgcttcttag

SEQ ID NO: 751 - DNA, 16 bp, Artificial Sequence
  oligonucleotide - internucleotide bonds are phosphorothioate bonds (PS)
  modified_base (1)..(4): LNA nucleoside
  modified_base (15)..(16): LNA nucleoside
ttgtttgtttaaaaag

SEQ ID NO: 752 - DNA, 16 bp, Artificial Sequence
  oligonucleotide - internucleotide bonds are phosphorothioate bonds (PS)
  modified_base (1)..(4): LNA nucleoside
  modified_base (13)..(16): LNA nucleoside
ttgtttgtttaaaaag

SEQ ID NO: 753 - DNA, 16 bp, Artificial Sequence
  oligonucleotide - internucleotide bonds are phosphorothioate bonds (PS)
  modified_base (1)..(4): LNA nucleoside
  modified_base (14)..(16): LNA nucleoside
ttgtttgtttaaaaag

SEQ ID NO: 754 - DNA, 15 bp, Artificial Sequence
  oligonucleotide - internucleotide bonds are phosphorothioate bonds (PS)
  modified_base (1)..(4): LNA nucleoside
  modified_base (13)..(15): LNA nucleoside
atatgataggatttc

SEQ ID NO: 755 - DNA, 15 bp, Artificial Sequence
  oligonucleotide - internucleotide bonds are phosphorothioate bonds (PS)
  modified_base (1)..(4): LNA nucleoside
  modified_base (12)..(15): LNA nucleoside
atatgataggatttc

SEQ ID NO: 756 - DNA, 15 bp, Artificial Sequence
  oligonucleotide - internucleotide bonds are phosphorothioate bonds (PS)
  modified_base (1)..(3): LNA nucleoside
  modified_base (12)..(15): LNA nucleoside
atatgataggatttc

SEQ ID NO: 757 - DNA, 16 bp, Artificial Sequence
  oligonucleotide - internucleotide bonds are phosphorothioate bonds (PS)
  modified_base (1)..(4): LNA nucleoside
  modified_base (13)..(16): LNA nucleoside
catatgataggatttc

SEQ ID NO: 758 - DNA, 16 bp, Artificial Sequence
  oligonucleotide - internucleotide bonds are phosphorothioate bonds (PS)
  modified_base (1)..(4): LNA nucleoside
  modified_base (14)..(16): LNA nucleoside
catatgataggatttc

SEQ ID NO: 759 - DNA, 16 bp, Artificial Sequence
  oligonucleotide - internucleotide bonds are phosphorothioate bonds (PS)
  modified_base (1)..(3): LNA nucleoside
  modified_base (13)..(16): LNA nucleoside
catatgataggatttc

SEQ ID NO: 760 - DNA, 17 bp, Artificial Sequence
  oligonucleotide - internucleotide bonds are phosphorothioate bonds (PS)
  modified_base (1)..(2): LNA nucleoside
  modified_base (15)..(17): LNA nucleoside
gcatatgataggatttc

SEQ ID NO: 761 - DNA, 17 bp, Artificial Sequence
  oligonucleotide - internucleotide bonds are phosphorothioate bonds (PS)
  modified_base (1)..(4): LNA nucleoside
  modified_base (15)..(17): LNA nucleoside
gcatatgataggatttc

SEQ ID NO: 762 - DNA, 17 bp, Artificial Sequence
  oligonucleotide - internucleotide bonds are phosphorothioate bonds (PS)
  modified_base (1)..(4): LNA nucleoside
  modified_base (14)..(17): LNA nucleoside
gcatatgataggatttc

SEQ ID NO: 763 - DNA, 18 bp, Artificial Sequence
  oligonucleotide - internucleotide bonds are phosphorothioate bonds (PS)
  modified_base (1)..(4): LNA nucleoside
  modified_base (17)..(18): LNA nucleoside
agcatatgataggatttc

SEQ ID NO: 764 - DNA, 18 bp, Artificial Sequence
  oligonucleotide - internucleotide bonds are phosphorothioate bonds (PS)
  modified_base (1)..(2): LNA nucleoside
  modified_base (16)..(18): LNA nucleoside
agcatatgataggatttc

SEQ ID NO: 765 - DNA, 18 bp, Artificial Sequence
  oligonucleotide - internucleotide bonds are phosphorothioate bonds (PS)
  modified_base (1)..(4): LNA nucleoside
  modified_base (15)..(18): LNA nucleoside
agcatatgataggatttc

SEQ ID NO: 766 - DNA, 19 bp, Artificial Sequence
  oligonucleotide - internucleotide bonds are phosphorothioate bonds (PS)
  modified_base (1)..(4): LNA nucleoside
  modified_base (16)..(19): LNA nucleoside
tagcatatgataggatttc

SEQ ID NO: 767 - DNA, 19 bp, Artificial Sequence
  oligonucleotide - internucleotide bonds are phosphorothioate bonds (PS)
  modified_base (1)..(2): LNA nucleoside
  modified_base (18)..(19): LNA nucleoside
tagcatatgataggatttc

SEQ ID NO: 768 - DNA, 19 bp, Artificial Sequence
  oligonucleotide - internucleotide bonds are phosphorothioate bonds (PS)
  modified_base (1)..(3): LNA nucleoside
  modified_base (16)..(19): LNA nucleoside
tagcatatgataggatttc

SEQ ID NO: 769 - DNA, 17 bp, Artificial Sequence
  oligonucleotide - internucleotide bonds are phosphorothioate bonds (PS)
  modified_base (1)..(3): LNA nucleoside
  modified_base (14)..(17): LNA nucleoside
atgataggatttccttc

SEQ ID NO: 770 - DNA, 17 bp, Artificial Sequence
  oligonucleotide - internucleotide bonds are phosphorothioate bonds (PS)
  modified_base (1)..(2): LNA nucleoside
  modified_base (15)..(17): LNA nucleoside
atgataggatttccttc

SEQ ID NO: 771 - DNA, 17 bp, Artificial Sequence
  oligonucleotide - internucleotide bonds are phosphorothioate bonds (PS)
  modified_base (1)..(4): LNA nucleoside
  modified_base (14)..(17): LNA nucleoside
atgataggatttccttc

SEQ ID NO: 772 - DNA, 18 bp, Artificial Sequence
  oligonucleotide - internucleotide bonds are phosphorothioate bonds (PS)
  modified_base (1)..(4): LNA nucleoside
  modified_base (15)..(18): LNA nucleoside
tatgataggatttccttc

SEQ ID NO: 773 - DNA, 18 bp, Artificial Sequence
  oligonucleotide - internucleotide bonds are phosphorothioate bonds (PS)
  modified_base (1)..(4): LNA nucleoside
  modified_base (17)..(18): LNA nucleoside
tatgataggatttccttc

SEQ ID NO: 774 - DNA, 18 bp, Artificial Sequence
  oligonucleotide - internucleotide bonds are phosphorothioate bonds (PS)
  modified_base (1)..(2): LNA nucleoside
  modified_base (17)..(18): LNA nucleoside
tatgataggatttccttc

SEQ ID NO: 775 - DNA, 19 bp, Artificial Sequence
  oligonucleotide - internucleotide bonds are phosphorothioate bonds (PS)
  modified_base (1)..(4): LNA nucleoside
  modified_base (16)..(19): LNA nucleoside
atatgataggatttccttc

SEQ ID NO: 776 - DNA, 19 bp, Artificial Sequence
  oligonucleotide - internucleotide bonds are phosphorothioate bonds (PS)
  modified_base (1)..(3): LNA nucleoside
  modified_base (17)..(19): LNA nucleoside
atatgataggatttccttc

SEQ ID NO: 777 - DNA, 19 bp, Artificial Sequence
  oligonucleotide - internucleotide bonds are phosphorothioate bonds (PS)
  modified_base (1)..(2): LNA nucleoside
  modified_base (18)..(19): LNA nucleoside
atatgataggatttccttc

SEQ ID NO: 778 - DNA, 20 bp, Artificial Sequence
  oligonucleotide - internucleotide bonds are phosphorothioate bonds (PS)
  modified_base (1)..(2): LNA nucleoside
  modified_base (19)..(20): LNA nucleoside
catatgataggatttccttc

SEQ ID NO: 779 - DNA, 20 bp, Artificial Sequence
  oligonucleotide - internucleotide bonds are phosphorothioate bonds (PS)
  modified_base (1)..(4): LNA nucleoside
  modified_base (18)..(20): LNA nucleoside
catatgataggatttccttc

SEQ ID NO: 780 - DNA, 20 bp, Artificial Sequence
  oligonucleotide - internucleotide bonds are phosphorothioate bonds (PS)
  modified_base (1)..(2): LNA nucleoside
  modified_base (18)..(20): LNA nucleoside
catatgataggatttccttc

SEQ ID NO: 781 - DNA, 18 bp, Artificial Sequence
  oligonucleotide - internucleotide bonds are phosphorothioate bonds (PS)
  modified_base (1)..(4): LNA nucleoside
  modified_base (15)..(18): LNA nucleoside
tttgcaaatctgaaactc

SEQ ID NO: 782 - DNA, 18 bp, Artificial Sequence
  oligonucleotide - internucleotide bonds are phosphorothioate bonds (PS)
  modified_base (1)..(3): LNA nucleoside
  modified_base (16)..(18): LNA nucleoside
tttgcaaatctgaaactc

SEQ ID NO: 783 - DNA, 18 bp, Artificial Sequence
  oligonucleotide - internucleotide bonds are phosphorothioate bonds (PS)
  modified_base (1)..(4): LNA nucleoside
  modified_base (16)..(18): LNA nucleoside
tttgcaaatctgaaactc

SEQ ID NO: 784 - DNA, 19 bp, Artificial Sequence
  oligonucleotide - internucleotide bonds are phosphorothioate bonds (PS)
  modified_base (1)..(4): LNA nucleoside
  modified_base (17)..(19): LNA nucleoside
ttttgcaaatctgaaactc

SEQ ID NO: 785 - DNA, 19 bp, Artificial Sequence
  oligonucleotide - internucleotide bonds are phosphorothioate bonds (PS)
  modified_base (1)..(4): LNA nucleoside
  modified_base (18)..(19): LNA nucleoside
ttttgcaaatctgaaactc

SEQ ID NO: 786 - DNA, 19 bp, Artificial Sequence
  oligonucleotide - internucleotide bonds are phosphorothioate bonds (PS)
  modified_base (1)..(4): LNA nucleoside
  modified_base (16)..(19): LNA nucleoside
ttttgcaaatctgaaactc

SEQ ID NO: 787 - DNA, 20 bp, Artificial Sequence
  oligonucleotide - internucleotide bonds are phosphorothioate bonds (PS)
  modified_base (1)..(3): LNA nucleoside
  modified_base (17)..(20): LNA nucleoside
attttgcaaatctgaaactc

SEQ ID NO: 788 - DNA, 20 bp, Artificial Sequence
  oligonucleotide - internucleotide bonds are phosphorothioate bonds (PS)
  modified_base (1)..(4): LNA nucleoside
  modified_base (17)..(20): LNA nucleoside
attttgcaaatctgaaactc

SEQ ID NO: 789 - DNA, 20 bp, Artificial Sequence
  oligonucleotide - internucleotide bonds are phosphorothioate bonds (PS)
  modified_base (1)..(3): LNA nucleoside
  modified_base (19)..(20): LNA nucleoside
attttgcaaatctgaaactc

SEQ ID NO: 790 - DNA, 16 bp, Artificial Sequence
  oligonucleotide - internucleotide bonds are phosphorothioate bonds (PS)
  modified_base (1)..(4): LNA nucleoside
  modified_base (13)..(16): LNA nucleoside
tttcattttgcaaatc

SEQ ID NO: 791 - DNA, 16 bp, Artificial Sequence
  oligonucleotide - internucleotide bonds are phosphorothioate bonds (PS)
  modified_base (1)..(4): LNA nucleoside
  modified_base (14)..(16): LNA nucleoside
tttcattttgcaaatc

SEQ ID NO: 792 - DNA, 16 bp, Artificial Sequence
  oligonucleotide - internucleotide bonds are phosphorothioate bonds (PS)
  modified_base (1)..(3): LNA nucleoside
  modified_base (13)..(16): LNA nucleoside
tttcattttgcaaatc

SEQ ID NO: 793 - DNA, 17 bp, Artificial Sequence
  oligonucleotide - internucleotide bonds are phosphorothioate bonds (PS)
  modified_base (1)..(4): LNA nucleoside
  modified_base (14)..(17): LNA nucleoside
ttttcattttgcaaatc

SEQ ID NO: 794 - DNA, 17 bp, Artificial Sequence
  oligonucleotide - internucleotide bonds are phosphorothioate bonds (PS)
  modified_base (1)..(3): LNA nucleoside
  modified_base (14)..(17): LNA nucleoside
ttttcattttgcaaatc

SEQ ID NO: 795 - DNA, 17 bp, Artificial Sequence
  oligonucleotide - internucleotide bonds are phosphorothioate bonds (PS)
  modified_base (1)..(4): LNA nucleoside
  modified_base (15)..(17): LNA nucleoside
ttttcattttgcaaatc

SEQ ID NO: 796 - DNA, 15 bp, Artificial Sequence
  oligonucleotide - internucleotide bonds are phosphorothioate bonds (PS)
  modified_base (1)..(3): LNA nucleoside
  modified_base (13)..(15): LNA nucleoside
tcctttgttcactgc

SEQ ID NO: 797 - DNA, 15 bp, Artificial Sequence
  oligonucleotide - internucleotide bonds are phosphorothioate bonds (PS)
  modified_base (1)..(2): LNA nucleoside
  modified_base (13)..(15): LNA nucleoside
tcctttgttcactgc

SEQ ID NO: 798 - DNA, 15 bp, Artificial Sequence
  oligonucleotide - internucleotide bonds are phosphorothioate bonds (PS)
  modified_base (1)..(2): LNA nucleoside
  modified_base (14)..(15): LNA nucleoside
tcctttgttcactgc

SEQ ID NO: 799 - DNA, 16 bp, Artificial Sequence
  oligonucleotide - internucleotide bonds are phosphorothioate bonds (PS)
  modified_base (1)..(2): LNA nucleoside
  modified_base (15)..(16): LNA nucleoside
ctcctttgttcactgc

SEQ ID NO: 800 - DNA, 16 bp, Artificial Sequence
  oligonucleotide - internucleotide bonds are phosphorothioate bonds (PS)
  modified_base (1)..(3): LNA nucleoside
  modified_base (15)..(16): LNA nucleoside
ctcctttgttcactgc

SEQ ID NO: 801 - DNA, 16 bp, Artificial Sequence
  oligonucleotide - internucleotide bonds are phosphorothioate bonds (PS)
  modified_base (1)..(3): LNA nucleoside
  modified_base (14)..(16): LNA nucleoside
ctcctttgttcactgc

SEQ ID NO: 802 - DNA, 15 bp, Artificial Sequence
  oligonucleotide - internucleotide bonds are phosphorothioate bonds (PS)
  modified_base (1)..(4): LNA nucleoside
  modified_base (13)..(15): LNA nucleoside
tatgataggatttcc

SEQ ID NO: 803 - DNA, 15 bp, Artificial Sequence
  oligonucleotide - internucleotide bonds are phosphorothioate bonds (PS)
  modified_base (1)..(4): LNA nucleoside
  modified_base (12)..(15): LNA nucleoside
tatgataggatttcc

SEQ ID NO: 804 - DNA, 15 bp, Artificial Sequence
  oligonucleotide - internucleotide bonds are phosphorothioate bonds (PS)
  modified_base (1)..(4): LNA nucleoside
  modified_base (14)..(15): LNA nucleoside
tatgataggatttcc

SEQ ID NO: 805 - DNA, 16 bp, Artificial Sequence
  oligonucleotide - internucleotide bonds are phosphorothioate bonds (PS)
  modified_base (1)..(2): LNA nucleoside
  modified_base (13)..(16): LNA nucleoside
atatgataggatttcc

SEQ ID NO: 806 - DNA, 16 bp, Artificial Sequence
  oligonucleotide - internucleotide bonds are phosphorothioate bonds (PS)
  modified_base (1)..(4): LNA nucleoside
  modified_base (13)..(16): LNA nucleoside
atatgataggatttcc

SEQ ID NO: 807 - DNA, 16 bp, Artificial Sequence
  oligonucleotide - internucleotide bonds are phosphorothioate bonds (PS)
  modified_base (1)..(4): LNA nucleoside
  modified_base (14)..(16): LNA nucleoside
atatgataggatttcc

SEQ ID NO: 808 - DNA, 17 bp, Artificial Sequence
  oligonucleotide - internucleotide bonds are phosphorothioate bonds (PS)
  modified_base (1)..(4): LNA nucleoside
  modified_base (14)..(17): LNA nucleoside
catatgataggatttcc

SEQ ID NO: 809 - DNA, 17 bp, Artificial Sequence
  oligonucleotide - internucleotide bonds are phosphorothioate bonds (PS)
  modified_base (1)..(3): LNA nucleoside
  modified_base (14)..(17): LNA nucleoside
catatgataggatttcc

SEQ ID NO: 810 - DNA, 17 bp, Artificial Sequence
  oligonucleotide - internucleotide bonds are phosphorothioate bonds (PS)
  modified_base (1)..(2): LNA nucleoside
  modified_base (16)..(17): LNA nucleoside
catatgataggatttcc

SEQ ID NO: 811 - DNA, 18 bp, Artificial Sequence
  oligonucleotide - internucleotide bonds are phosphorothioate bonds (PS)
  modified_base (1)..(2): LNA nucleoside
  modified_base (16)..(18): LNA nucleoside
gcatatgataggatttcc

SEQ ID NO: 812 - DNA, 18 bp, Artificial Sequence
  oligonucleotide - internucleotide bonds are phosphorothioate bonds (PS)
  modified_base (1)..(3): LNA nucleoside
  modified_base (16)..(18): LNA nucleoside
gcatatgataggatttcc

SEQ ID NO: 813 - DNA, 18 bp, Artificial Sequence
  oligonucleotide - internucleotide bonds are phosphorothioate bonds (PS)
  modified_base (1)..(2): LNA nucleoside
  modified_base (17)..(18): LNA nucleoside
gcatatgataggatttcc

SEQ ID NO: 814 - DNA, 19 bp, Artificial Sequence
  oligonucleotide - internucleotide bonds are phosphorothioate bonds (PS)
  modified_base (1)..(2): LNA nucleoside
  modified_base (17)..(19): LNA nucleoside
agcatatgataggatttcc

SEQ ID NO: 815 - DNA, 19 bp, Artificial Sequence
  oligonucleotide - internucleotide bonds are phosphorothioate bonds (PS)
  modified_base (1)..(2): LNA nucleoside
  modified_base (18)..(19): LNA nucleoside
agcatatgataggatttcc

SEQ ID NO: 816 - DNA, 19 bp, Artificial Sequence
  oligonucleotide - internucleotide bonds are phosphorothioate bonds (PS)
  modified_base (1)..(3): LNA nucleoside
  modified_base (18)..(19): LNA nucleoside
agcatatgataggatttcc

SEQ ID NO: 817 - DNA, 20 bp, Artificial Sequence
  oligonucleotide - internucleotide bonds are phosphorothioate bonds (PS)
  modified_base (1)..(2): LNA nucleoside
  modified_base (17)..(20): LNA nucleoside
tagcatatgataggatttcc

SEQ ID NO: 818 - DNA, 20 bp, Artificial Sequence
  oligonucleotide - internucleotide bonds are phosphorothioate bonds (PS)
  modified_base (1)..(2): LNA nucleoside
  modified_base (18)..(20): LNA nucleoside
tagcatatgataggatttcc

SEQ ID NO: 819 - DNA, 20 bp, Artificial Sequence
  oligonucleotide - internucleotide bonds are phosphorothioate bonds (PS)
  modified_base (1)..(2): LNA nucleoside
  modified_base (19)..(20): LNA nucleoside
tagcatatgataggatttcc

SEQ ID NO: 820 - DNA, 15 bp, Artificial Sequence
  oligonucleotide - internucleotide bonds are phosphorothioate bonds (PS)
  modified_base (1)..(2): LNA nucleoside
  modified_base (14)..(15): LNA nucleoside
ataggatttccttcc

SEQ ID NO: 821 - DNA, 15 bp, Artificial Sequence
  oligonucleotide - internucleotide bonds are phosphorothioate bonds (PS)
  modified_base (1)..(3): LNA nucleoside
  modified_base (13)..(15): LNA nucleoside
ataggatttccttcc

SEQ ID NO: 822 - DNA, 15 bp, Artificial Sequence
  oligonucleotide - internucleotide bonds are phosphorothioate bonds (PS)
  modified_base (1)..(4): LNA nucleoside
  modified_base (12)..(15): LNA nucleoside
ataggatttccttcc

SEQ ID NO: 823 - DNA, 16 bp, Artificial Sequence
  oligonucleotide - internucleotide bonds are phosphorothioate bonds (PS)
  modified_base (1)..(4): LNA nucleoside
  modified_base (14)..(16): LNA nucleoside
gataggatttccttcc

SEQ ID NO: 824 - DNA, 16 bp, Artificial Sequence
  oligonucleotide - internucleotide bonds are phosphorothioate bonds (PS)
  modified_base (1)..(2): LNA nucleoside
  modified_base (15)..(16): LNA nucleoside
gataggatttccttcc

SEQ ID NO: 825 - DNA, 16 bp, Artificial Sequence
  oligonucleotide - internucleotide bonds are phosphorothioate bonds (PS)
  modified_base (1)..(2): LNA nucleoside
  modified_base (14)..(16): LNA nucleoside
gataggatttccttcc

SEQ ID NO: 826 - DNA, 17 bp, Artificial Sequence
  oligonucleotide - internucleotide bonds are phosphorothioate bonds (PS)
  modified_base (1)..(2): LNA nucleoside
  modified_base (15)..(17): LNA nucleoside
tgataggatttccttcc

SEQ ID NO: 827 - DNA, 17 bp, Artificial Sequence
  oligonucleotide - internucleotide bonds are phosphorothioate bonds (PS)
  modified_base (1)..(2): LNA nucleoside
  modified_base (16)..(17): LNA nucleoside
tgataggatttccttcc

SEQ ID NO: 828 - DNA, 17 bp, Artificial Sequence
  oligonucleotide - internucleotide bonds are phosphorothioate bonds (PS)
  modified_base (1)..(4): LNA nucleoside
  modified_base (16)..(17): LNA nucleoside
tgataggatttccttcc

SEQ ID NO: 829 - DNA, 18 bp, Artificial Sequence
  oligonucleotide - internucleotide bonds are phosphorothioate bonds (PS)
  modified_base (1)..(2): LNA nucleoside
  modified_base (17)..(18): LNA nucleoside
atgataggatttccttcc

SEQ ID NO: 830 - DNA, 18 bp, Artificial Sequence
  oligonucleotide - internucleotide bonds are phosphorothioate bonds (PS)
  modified_base (1)..(3): LNA nucleoside
  modified_base (16)..(18): LNA nucleoside
atgataggatttccttcc

SEQ ID NO: 831 - DNA, 18 bp, Artificial Sequence
  oligonucleotide - internucleotide bonds are phosphorothioate bonds (PS)
  modified_base (1)..(2): LNA nucleoside
  modified_base (16)..(18): LNA nucleoside
atgataggatttccttcc

SEQ ID NO: 832 - DNA, 19 bp, Artificial Sequence
  oligonucleotide - internucleotide bonds are phosphorothioate bonds (PS)
  modified_base (1)..(2): LNA nucleoside
  modified_base (18)..(19): LNA nucleoside
tatgataggatttccttcc

SEQ ID NO: 833 - DNA, 19 bp, Artificial Sequence
  oligonucleotide - internucleotide bonds are phosphorothioate bonds (PS)
  modified_base (1)..(2): LNA nucleoside
  modified_base (17)..(19): LNA nucleoside
tatgataggatttccttcc

SEQ ID NO: 834 - DNA, 19 bp, Artificial Sequence
  oligonucleotide - internucleotide bonds are phosphorothioate bonds (PS)
  modified_base (1)..(3): LNA nucleoside
  modified_base (18)..(19): LNA nucleoside
tatgataggatttccttcc

SEQ ID NO: 835 - DNA, 20 bp, Artificial Sequence
  oligonucleotide - internucleotide bonds are phosphorothioate bonds (PS)
  modified_base (1)..(3): LNA nucleoside
  modified_base (19)..(20): LNA nucleoside
atatgataggatttccttcc

SEQ ID NO: 836 - DNA, 20 bp, Artificial Sequence
  oligonucleotide - internucleotide bonds are phosphorothioate bonds (PS)
  modified_base (1)..(2): LNA nucleoside
  modified_base (18)..(20): LNA nucleoside
atatgataggatttccttcc

SEQ ID NO: 837 - DNA, 20 bp, Artificial Sequence
  oligonucleotide - internucleotide bonds are phosphorothioate bonds (PS)
  modified_base (1)..(2): LNA nucleoside
  modified_base (19)..(20): LNA nucleoside
atatgataggatttccttcc

SEQ ID NO: 838 - DNA, 16 bp, Artificial Sequence
  oligonucleotide - internucleotide bonds are phosphorothioate bonds (PS)
  modified_base (1)..(3): LNA nucleoside
  modified_base (13)..(16): LNA nucleoside
tttgcaaatctgaaac

SEQ ID NO: 839 - DNA, 16 bp, Artificial Sequence
  oligonucleotide - internucleotide bonds are phosphorothioate bonds (PS)
  modified_base (1)..(4): LNA nucleoside
  modified_base (14)..(16): LNA nucleoside
tttgcaaatctgaaac

SEQ ID NO: 840 - DNA, 16 bp, Artificial Sequence
  oligonucleotide - internucleotide bonds are phosphorothioate bonds (PS)
  modified_base (1)..(4): LNA nucleoside
  modified_base (13)..(16): LNA nucleoside
tttgcaaatctgaaac

SEQ ID NO: 841 - DNA, 17 bp, Artificial Sequence
  oligonucleotide - internucleotide bonds are phosphorothioate bonds (PS)
  modified_base (1)..(4): LNA nucleoside
  modified_base (14)..(17): LNA nucleoside
ttttgcaaatctgaaac

SEQ ID NO: 842 - DNA, 17 bp, Artificial Sequence
  oligonucleotide - internucleotide bonds are phosphorothioate bonds (PS)
  modified_base (1)..(4): LNA nucleoside
  modified_base (15)..(17): LNA nucleoside
ttttgcaaatctgaaac

SEQ ID NO: 843 - DNA, 17 bp, Artificial Sequence
  oligonucleotide - internucleotide bonds are phosphorothioate bonds (PS)
  modified_base (1)..(4): LNA nucleoside
  modified_base (16)..(17): LNA nucleoside
ttttgcaaatctgaaac

SEQ ID NO: 844 - DNA, 18 bp, Artificial Sequence
  oligonucleotide - internucleotide bonds are phosphorothioate bonds (PS)
  modified_base (1)..(4): LNA nucleoside
  modified_base (16)..(18): LNA nucleoside
attttgcaaatctgaaac

SEQ ID NO: 845 - DNA, 18 bp, Artificial Sequence
  oligonucleotide - internucleotide bonds are phosphorothioate bonds (PS)
  modified_base (1)..(4): LNA nucleoside
  modified_base (15)..(18): LNA nucleoside
attttgcaaatctgaaac

SEQ ID NO: 846 - DNA, 18 bp, Artificial Sequence
  oligonucleotide - internucleotide bonds are phosphorothioate bonds (PS)
  modified_base (1)..(3): LNA nucleoside
  modified_base (15)..(18): LNA nucleoside
attttgcaaatctgaaac

SEQ ID NO: 847 - DNA, 19 bp, Artificial Sequence
  oligonucleotide - internucleotide bonds are phosphorothioate bonds (PS)
  modified_base (1)..(4): LNA nucleoside
  modified_base (18)..(19): LNA nucleoside
cattttgcaaatctgaaac

SEQ ID NO: 848 - DNA, 19 bp, Artificial Sequence
  oligonucleotide - internucleotide bonds are phosphorothioate bonds (PS)
  modified_base (1)..(4): LNA nucleoside
  modified_base (16)..(19): LNA nucleoside
cattttgcaaatctgaaac

SEQ ID NO: 849 - DNA, 19 bp, Artificial Sequence
  oligonucleotide - internucleotide bonds are phosphorothioate bonds (PS)
  modified_base (1)..(4): LNA nucleoside
  modified_base (17)..(19): LNA nucleoside
cattttgcaaatctgaaac

SEQ ID NO: 850 - DNA, 20 bp, Artificial Sequence
  oligonucleotide - internucleotide bonds are phosphorothioate bonds (PS)
  modified_base (1)..(4): LNA nucleoside
  modified_base (17)..(20): LNA nucleoside
tcattttgcaaatctgaaac

SEQ ID NO: 851 - DNA, 20 bp, Artificial Sequence
  oligonucleotide - internucleotide bonds are phosphorothioate bonds (PS)
  modified_base (1)..(2): LNA nucleoside
  modified_base (17)..(20): LNA nucleoside
tcattttgcaaatctgaaac

SEQ ID NO: 852 - DNA, 20 bp, Artificial Sequence
  oligonucleotide - internucleotide bonds are phosphorothioate bonds (PS)
  modified_base (1)..(4): LNA nucleoside
  modified_base (18)..(20): LNA nucleoside
tcattttgcaaatctgaaac

SEQ ID NO: 853 - DNA, 16 bp, Artificial Sequence
  oligonucleotide - internucleotide bonds are phosphorothioate bonds (PS)
  modified_base (1)..(3): LNA nucleoside
  modified_base (13)..(16): LNA nucleoside
caaatctgaaactcta

SEQ ID NO: 854 - DNA, 16 bp, Artificial Sequence
  oligonucleotide - internucleotide bonds are phosphorothioate bonds (PS)
  modified_base (1)..(4): LNA nucleoside
  modified_base (13)..(16): LNA nucleoside
caaatctgaaactcta

SEQ ID NO: 855 - DNA, 16 bp, Artificial Sequence
  oligonucleotide - internucleotide bonds are phosphorothioate bonds (PS)
  modified_base (1)..(2): LNA nucleoside
  modified_base (13)..(16): LNA nucleoside
caaatctgaaactcta

SEQ ID NO: 856 - DNA, 17 bp, Artificial Sequence
  oligonucleotide - internucleotide bonds are phosphorothioate bonds (PS)
  modified_base (1)..(3): LNA nucleoside
  modified_base (16)..(17): LNA nucleoside
gcaaatctgaaactcta

SEQ ID NO: 857 - DNA, 17 bp, Artificial Sequence
  oligonucleotide - internucleotide bonds are phosphorothioate bonds (PS)
  modified_base (1)..(4): LNA nucleoside
  modified_base (14)..(17): LNA nucleoside
gcaaatctgaaactcta

SEQ ID NO: 858 - DNA, 17 bp, Artificial Sequence
  oligonucleotide - internucleotide bonds are phosphorothioate bonds (PS)
  modified_base (1)..(3): LNA nucleoside
  modified_base (14)..(17): LNA nucleoside
gcaaatctgaaactcta

SEQ ID NO: 859 - DNA, 18 bp, Artificial Sequence
  oligonucleotide - internucleotide bonds are phosphorothioate bonds (PS)
  modified_base (1)..(4): LNA nucleoside
  modified_base (15)..(18): LNA nucleoside
tgcaaatctgaaactcta

SEQ ID NO: 860 - DNA, 18 bp, Artificial Sequence
  oligonucleotide - internucleotide bonds are phosphorothioate bonds (PS)
  modified_base (1)..(3): LNA nucleoside
  modified_base (16)..(18): LNA nucleoside
tgcaaatctgaaactcta

SEQ ID NO: 861 - DNA, 18 bp, Artificial Sequence
  oligonucleotide - internucleotide bonds are phosphorothioate bonds (PS)
  modified_base (1)..(2): LNA nucleoside
  modified_base (16)..(18): LNA nucleoside
tgcaaatctgaaactcta

SEQ ID NO: 862 - DNA, 19 bp, Artificial Sequence
  oligonucleotide - internucleotide bonds are phosphorothioate bonds (PS)
  modified_base (1)..(4): LNA nucleoside
  modified_base (16)..(19): LNA nucleoside
ttgcaaatctgaaactcta

SEQ ID NO: 863 - DNA, 19 bp, Artificial Sequence
  oligonucleotide - internucleotide bonds are phosphorothioate bonds (PS)
  modified_base (1)..(3): LNA nucleoside
  modified_base (18)..(19): LNA nucleoside
ttgcaaatctgaaactcta

SEQ ID NO: 864 - DNA, 19 bp, Artificial Sequence
  oligonucleotide - internucleotide bonds are phosphorothioate bonds (PS)
  modified_base (1)..(4): LNA nucleoside
  modified_base (18)..(19): LNA nucleoside
ttgcaaatctgaaactcta

SEQ ID NO: 865 - DNA, 20 bp, Artificial Sequence
  oligonucleotide - internucleotide bonds are phosphorothioate bonds (PS)
  modified_base (1)..(2): LNA nucleoside
  modified_base (19)..(20): LNA nucleoside
tttgcaaatctgaaactcta

SEQ ID NO: 866 - DNA, 20 bp, Artificial Sequence
  oligonucleotide - internucleotide bonds are phosphorothioate bonds (PS)
  modified_base (1)..(3): LNA nucleoside
  modified_base (18)..(20): LNA nucleoside
tttgcaaatctgaaactcta

SEQ ID NO: 867 - DNA, 20 bp, Artificial Sequence
  oligonucleotide - internucleotide bonds are phosphorothioate bonds (PS)
  modified_base (1)..(4): LNA nucleoside
  modified_base (17)..(20): LNA nucleoside
tttgcaaatctgaaactcta

SEQ ID NO: 868 - DNA, 16 bp, Artificial Sequence
  oligonucleotide - internucleotide bonds are phosphorothioate bonds (PS)
  modified_base (1)..(3): LNA nucleoside
  modified_base (14)..(16): LNA nucleoside
cattttgcaaatctga

SEQ ID NO: 869 - DNA, 16 bp, Artificial Sequence
  oligonucleotide - internucleotide bonds are phosphorothioate bonds (PS)
  modified_base (1)..(3): LNA nucleoside
  modified_base (13)..(16): LNA nucleoside
cattttgcaaatctga

SEQ ID NO: 870 - DNA, 16 bp, Artificial Sequence
  oligonucleotide - internucleotide bonds are phosphorothioate bonds (PS)
  modified_base (1)..(4): LNA nucleoside
  modified_base (13)..(16): LNA nucleoside
cattttgcaaatctga

SEQ ID NO: 871 - DNA, 17 bp, Artificial Sequence
  oligonucleotide - internucleotide bonds are phosphorothioate bonds (PS)
  modified_base (1)..(3): LNA nucleoside
  modified_base (14)..(17): LNA nucleoside
tcattttgcaaatctga

SEQ ID NO: 872 - DNA, 17 bp, Artificial Sequence
  oligonucleotide - internucleotide bonds are phosphorothioate bonds (PS)
  modified_base (1)..(4): LNA nucleoside
  modified_base (14)..(17): LNA nucleoside
tcattttgcaaatctga

SEQ ID NO: 873 - DNA, 17 bp, Artificial Sequence
  oligonucleotide - internucleotide bonds are phosphorothioate bonds (PS)
  modified_base (1)..(2): LNA nucleoside
  modified_base (15)..(17): LNA nucleoside
tcattttgcaaatctga

SEQ ID NO: 874 - DNA, 18 bp, Artificial Sequence
  oligonucleotide - internucleotide bonds are phosphorothioate bonds (PS)
  modified_base (1)..(3): LNA nucleoside
  modified_base (17)..(18): LNA nucleoside
ttcattttgcaaatctga

SEQ ID NO: 875 - DNA, 18 bp, Artificial Sequence
  oligonucleotide - internucleotide bonds are phosphorothioate bonds (PS)
  modified_base (1)..(4): LNA nucleoside
  modified_base (15)..(18): LNA nucleoside
ttcattttgcaaatctga

SEQ ID NO: 876 - DNA, 18 bp, Artificial Sequence
  oligonucleotide - internucleotide bonds are phosphorothioate bonds (PS)
  modified_base (1)..(4): LNA nucleoside
  modified_base (16)..(18): LNA nucleoside
ttcattttgcaaatctga

SEQ ID NO: 877 - DNA, 19 bp, Artificial Sequence
  oligonucleotide - internucleotide bonds are phosphorothioate bonds (PS)
  modified_base (1)..(3): LNA nucleoside
  modified_base (18)..(19): LNA nucleoside
tttcattttgcaaatctga

SEQ ID NO: 878 - DNA, 19 bp, Artificial Sequence
  oligonucleotide - internucleotide bonds are phosphorothioate bonds (PS)
  modified_base (1)..(4): LNA nucleoside
  modified_base (16)..(19): LNA nucleoside
tttcattttgcaaatctga

SEQ ID NO: 879 - DNA, 19 bp, Artificial Sequence
  oligonucleotide - internucleotide bonds are phosphorothioate bonds (PS)
  modified_base (1)..(2): LNA nucleoside
  modified_base (16)..(19): LNA nucleoside
tttcattttgcaaatctga

SEQ ID NO: 880 - DNA, 20 bp, Artificial Sequence
  oligonucleotide - internucleotide bonds are phosphorothioate bonds (PS)
  modified_base (1)..(4): LNA nucleoside
  modified_base (17)..(20): LNA nucleoside
ttttcattttgcaaatctga

SEQ ID NO: 881 - DNA, 20 bp, Artificial Sequence
  oligonucleotide - internucleotide bonds are phosphorothioate bonds (PS)
  modified_base (1)..(2): LNA nucleoside
  modified_base (19)..(20): LNA nucleoside
ttttcattttgcaaatctga

SEQ ID NO: 882 - DNA, 20 bp, Artificial Sequence
  oligonucleotide - internucleotide bonds are phosphorothioate bonds (PS)
  modified_base (1)..(3): LNA nucleoside
  modified_base (18)..(20): LNA nucleoside
ttttcattttgcaaatctga

SEQ ID NO: 883 - DNA, 14 bp, Artificial Sequence
  oligonucleotide - internucleotide bonds are phosphorothioate bonds (PS)
  modified_base (1)..(4): LNA nucleoside
  modified_base (12)..(14): LNA nucleoside
agcatatgatagga

SEQ ID NO: 884 - DNA, 14 bp, Artificial Sequence
  oligonucleotide - internucleotide bonds are phosphorothioate bonds (PS)
  modified_base (1)..(4): LNA nucleoside
  modified_base (13)..(14): LNA nucleoside
agcatatgatagga

SEQ ID NO: 885 - DNA, 14 bp, Artificial Sequence
  oligonucleotide - internucleotide bonds are phosphorothioate bonds (PS)
  modified_base (1)..(4): LNA nucleoside
  modified_base (11)..(14): LNA nucleoside
agcatatgatagga

SEQ ID NO: 886 - DNA, 15 bp, Artificial Sequence
  oligonucleotide - internucleotide bonds are phosphorothioate bonds (PS)
  modified_base (1)..(4): LNA nucleoside
  modified_base (12)..(15): LNA nucleoside
tagcatatgatagga

SEQ ID NO: 887 - DNA, 15 bp, Artificial Sequence
  oligonucleotide - internucleotide bonds are phosphorothioate bonds (PS)
  modified_base (1)..(4): LNA nucleoside
  modified_base (13)..(15): LNA nucleoside
tagcatatgatagga

SEQ ID NO: 888 - DNA, 15 bp, Artificial Sequence
  oligonucleotide - internucleotide bonds are phosphorothioate bonds (PS)
  modified_base (1)..(2): LNA nucleoside
  modified_base (12)..(15): LNA nucleoside
tagcatatgatagga

SEQ ID NO: 889 - DNA, 15 bp, Artificial Sequence
  oligonucleotide - internucleotide bonds are phosphorothioate bonds (PS)
  modified_base (1)..(4): LNA nucleoside
  modified_base (12)..(15): LNA nucleoside
ttttgcaaatctgaa

SEQ ID NO: 890 - DNA, 15 bp, Artificial Sequence
  oligonucleotide - internucleotide bonds are phosphorothioate bonds (PS)
  modified_base (1)..(3): LNA nucleoside
  modified_base (12)..(15): LNA nucleoside
ttttgcaaatctgaa

SEQ ID NO: 891 - DNA, 15 bp, Artificial Sequence
  oligonucleotide - internucleotide bonds are phosphorothioate bonds (PS)
  modified_base (1)..(4): LNA nucleoside
  modified_base (13)..(15): LNA nucleoside
ttttgcaaatctgaa

SEQ ID NO: 892 - DNA, 16 bp, Artificial Sequence
  oligonucleotide - internucleotide bonds are phosphorothioate bonds (PS)
  modified_base (1)..(3): LNA nucleoside
  modified_base (13)..(16): LNA nucleoside
attttgcaaatctgaa

SEQ ID NO: 893 - DNA, 16 bp, Artificial Sequence
  oligonucleotide - internucleotide bonds are phosphorothioate bonds (PS)
  modified_base (1)..(4): LNA nucleoside
  modified_base (13)..(16): LNA nucleoside
attttgcaaatctgaa

SEQ ID NO: 894 - DNA, 16 bp, Artificial Sequence
  oligonucleotide - internucleotide bonds are phosphorothioate bonds (PS)
  modified_base (1)..(2): LNA nucleoside
  modified_base (13)..(16): LNA nucleoside
attttgcaaatctgaa

SEQ ID NO: 895 - DNA, 17 bp, Artificial Sequence
  oligonucleotide - internucleotide bonds are phosphorothioate bonds (PS)
  modified_base (1)..(4): LNA nucleoside
  modified_base (15)..(17): LNA nucleoside
cattttgcaaatctgaa

SEQ ID NO: 896 - DNA, 17 bp, Artificial Sequence
  oligonucleotide - internucleotide bonds are phosphorothioate bonds (PS)
  modified_base (1)..(3): LNA nucleoside
  modified_base (14)..(17): LNA nucleoside
cattttgcaaatctgaa

SEQ ID NO: 897 - DNA, 17 bp, Artificial Sequence
  oligonucleotide - internucleotide bonds are phosphorothioate bonds (PS)
  modified_base (1)..(4): LNA nucleoside
  modified_base (14)..(17): LNA nucleoside
cattttgcaaatctgaa

SEQ ID NO: 898 - DNA, 18 bp, Artificial Sequence
  oligonucleotide - internucleotide bonds are phosphorothioate bonds (PS)
  modified_base (1)..(4): LNA nucleoside
  modified_base (15)..(18): LNA nucleoside
tcattttgcaaatctgaa

SEQ ID NO: 899 - DNA, 18 bp, Artificial Sequence
  oligonucleotide - internucleotide bonds are phosphorothioate bonds (PS)
  modified_base (1)..(3): LNA nucleoside
  modified_base (15)..(18): LNA nucleoside
tcattttgcaaatctgaa

SEQ ID NO: 900 - DNA, 18 bp, Artificial Sequence
  oligonucleotide - internucleotide bonds are phosphorothioate bonds (PS)
  modified_base (1)..(4): LNA nucleoside
  modified_base (17)..(18): LNA nucleoside
tcattttgcaaatctgaa

SEQ ID NO: 901 - DNA, 19 bp, Artificial Sequence
  oligonucleotide - internucleotide bonds are phosphorothioate bonds (PS)
  modified_base (1)..(4): LNA nucleoside
  modified_base (16)..(19): LNA nucleoside
ttcattttgcaaatctgaa

SEQ ID NO: 902 - DNA, 19 bp, Artificial Sequence
  oligonucleotide - internucleotide bonds are phosphorothioate bonds (PS)
  modified_base (1)..(3): LNA nucleoside
  modified_base (17)..(19): LNA nucleoside
ttcattttgcaaatctgaa

SEQ ID NO: 903 - DNA, 19 bp, Artificial Sequence
  oligonucleotide - internucleotide bonds are phosphorothioate bonds (PS)
  modified_base (1)..(3): LNA nucleoside
  modified_base (16)..(19): LNA nucleoside
ttcattttgcaaatctgaa

SEQ ID NO: 904 - DNA, 20 bp, Artificial Sequence
  oligonucleotide - internucleotide bonds are phosphorothioate bonds (PS)
  modified_base (1)..(2): LNA nucleoside
  modified_base (18)..(20): LNA nucleoside
tttcattttgcaaatctgaa

SEQ ID NO: 905 - DNA, 20 bp, Artificial Sequence
  oligonucleotide - internucleotide bonds are phosphorothioate bonds (PS)
  modified_base (1)..(4): LNA nucleoside
  modified_base (17)..(20): LNA nucleoside
tttcattttgcaaatctgaa

SEQ ID NO: 906 - DNA, 20 bp, Artificial Sequence
  oligonucleotide - internucleotide bonds are phosphorothioate bonds (PS)
  modified_base (1)..(3): LNA nucleoside
  modified_base (17)..(20): LNA nucleoside
tttcattttgcaaatctgaa

SEQ ID NO: 907 - DNA, 16 bp, Artificial Sequence
  oligonucleotide - internucleotide bonds are phosphorothioate bonds (PS)
  modified_base (1)..(4): LNA nucleoside
  modified_base (14)..(16): LNA nucleoside
ttttgcaaatctgaaa

SEQ ID NO: 908 - DNA, 16 bp, Artificial Sequence
  oligonucleotide - internucleotide bonds are phosphorothioate bonds (PS)
  modified_base (1)..(3): LNA nucleoside
  modified_base (13)..(16): LNA nucleoside
ttttgcaaatctgaaa

SEQ ID NO: 909 - DNA, 16 bp, Artificial Sequence
  oligonucleotide - internucleotide bonds are phosphorothioate bonds (PS)
  modified_base (1)..(4): LNA nucleoside
  modified_base (13)..(16): LNA nucleoside
ttttgcaaatctgaaa

SEQ ID NO: 910 - DNA, 17 bp, Artificial Sequence
  oligonucleotide - internucleotide bonds are phosphorothioate bonds (PS)
  modified_base (1)..(3): LNA nucleoside
  modified_base (14)..(17): LNA nucleoside
attttgcaaatctgaaa

SEQ ID NO: 911 - DNA, 17 bp, Artificial Sequence
  oligonucleotide - internucleotide bonds are phosphorothioate bonds (PS)
  modified_base (1)..(4): LNA nucleoside
  modified_base (14)..(17): LNA nucleoside
attttgcaaatctgaaa

SEQ ID NO: 912 - DNA, 17 bp, Artificial Sequence
  oligonucleotide - internucleotide bonds are phosphorothioate bonds (PS)
  modified_base (1)..(4): LNA nucleoside
  modified_base (15)..(17): LNA nucleoside
attttgcaaatctgaaa

SEQ ID NO: 913 - DNA, 18 bp, Artificial Sequence
  oligonucleotide - internucleotide bonds are phosphorothioate bonds (PS)
  modified_base (1)..(4): LNA nucleoside
  modified_base (15)..(18): LNA nucleoside
cattttgcaaatctgaaa

SEQ ID NO: 914 - DNA, 18 bp, Artificial Sequence
  oligonucleotide - internucleotide bonds are phosphorothioate bonds (PS)
  modified_base (1)..(4): LNA nucleoside
  modified_base (16)..(18): LNA nucleoside
cattttgcaaatctgaaa

SEQ ID NO: 915 - DNA, 18 bp, Artificial Sequence
  oligonucleotide - internucleotide bonds are phosphorothioate bonds (PS)
  modified_base (1)..(3): LNA nucleoside
  modified_base (15)..(18): LNA nucleoside
cattttgcaaatctgaaa

SEQ ID NO: 916 - DNA, 19 bp, Artificial Sequence
  oligonucleotide - internucleotide bonds are phosphorothioate bonds (PS)
  modified_base (1)..(3): LNA nucleoside
  modified_base (16)..(19): LNA nucleoside
tcattttgcaaatctgaaa

SEQ ID NO: 917 - DNA, 19 bp, Artificial Sequence
  oligonucleotide - internucleotide bonds are phosphorothioate bonds (PS)
  modified_base (1)..(4): LNA nucleoside
  modified_base (18)..(19): LNA nucleoside
tcattttgcaaatctgaaa

SEQ ID NO: 918 - DNA, 19 bp, Artificial Sequence
  oligonucleotide - internucleotide bonds are phosphorothioate bonds (PS)
  modified_base (1)..(4): LNA nucleoside
  modified_base (16)..(19): LNA nucleoside
tcattttgcaaatctgaaa

SEQ ID NO: 919 - DNA, 20 bp, Artificial Sequence
  oligonucleotide - internucleotide bonds are phosphorothioate bonds (PS)
  modified_base (1)..(4): LNA nucleoside
  modified_base (17)..(20): LNA nucleoside
ttcattttgcaaatctgaaa

SEQ ID NO: 920 - DNA, 20 bp, Artificial Sequence
  oligonucleotide - internucleotide bonds are phosphorothioate bonds (PS)
  modified_base (1)..(4): LNA nucleoside
  modified_base (18)..(20): LNA nucleoside
ttcattttgcaaatctgaaa

SEQ ID NO: 921 - DNA, 20 bp, Artificial Sequence
  oligonucleotide - internucleotide bonds are phosphorothioate bonds (PS)
  modified_base (1)..(2): LNA nucleoside
  modified_base (17)..(20): LNA nucleoside
ttcattttgcaaatctgaaa

SEQ ID NO: 922 - DNA, 14 bp, Artificial Sequence
  oligonucleotide - internucleotide bonds are phosphorothioate bonds (PS)
  modified_base (1)..(4): LNA nucleoside
  modified_base (13)..(14): LNA nucleoside
cctgtaattcacac

SEQ ID NO: 923 - DNA, 14 bp, Artificial Sequence
  oligonucleotide - internucleotide bonds are phosphorothioate bonds (PS)
  modified_base (1)..(4): LNA nucleoside
  modified_base (11)..(14): LNA nucleoside
cctgtaattcacac

SEQ ID NO: 924 - DNA, 14 bp, Artificial Sequence
  oligonucleotide - internucleotide bonds are phosphorothioate bonds (PS)
  modified_base (1)..(4): LNA nucleoside
  modified_base (12)..(14): LNA nucleoside
cctgtaattcacac

SEQ ID NO: 925 - DNA, 15 bp, Artificial Sequence
  oligonucleotide - internucleotide bonds are phosphorothioate bonds (PS)
  modified_base (1)..(4): LNA nucleoside
  modified_base (13)..(15): LNA nucleoside
ctaattatggaaaac

SEQ ID NO: 926 - DNA, 15 bp, Artificial Sequence
  oligonucleotide - internucleotide bonds are phosphorothioate bonds (PS)
  modified_base (1)..(4): LNA nucleoside
  modified_base (12)..(15): LNA nucleoside
ctaattatggaaaac

SEQ ID NO: 927 - DNA, 15 bp, Artificial Sequence
  oligonucleotide - internucleotide bonds are phosphorothioate bonds (PS)
  modified_base (1)..(3): LNA nucleoside
  modified_base (12)..(15): LNA nucleoside
ctaattatggaaaac

SEQ ID NO: 928 - DNA, 16 bp, Artificial Sequence
  oligonucleotide - internucleotide bonds are phosphorothioate bonds (PS)
  modified_base (1)..(4): LNA nucleoside
  modified_base (15)..(16): LNA nucleoside
cctaattatggaaaac

SEQ ID NO: 929 - DNA, 16 bp, Artificial Sequence
  oligonucleotide - internucleotide bonds are phosphorothioate bonds (PS)
  modified_base (1)..(4): LNA nucleoside
  modified_base (13)..(16): LNA nucleoside
cctaattatggaaaac

SEQ ID NO: 930 - DNA, 16 bp, Artificial Sequence
  oligonucleotide - internucleotide bonds are phosphorothioate bonds (PS)
  modified_base (1)..(4): LNA nucleoside
  modified_base (14)..(16): LNA nucleoside
cctaattatggaaaac

SEQ ID NO: 931 - DNA, 15 bp, Artificial Sequence
  oligonucleotide - internucleotide bonds are phosphorothioate bonds (PS)
  modified_base (1)..(4): LNA nucleoside
  modified_base (13)..(15): LNA nucleoside
cctgtaattcacaca

SEQ ID NO: 932 - DNA, 15 bp, Artificial Sequence
  oligonucleotide - internucleotide bonds are phosphorothioate bonds (PS)
  modified_base (1)..(4): LNA nucleoside
  modified_base (12)..(15): LNA nucleoside
cctgtaattcacaca

SEQ ID NO: 933 - DNA, 15 bp, Artificial Sequence
  oligonucleotide - internucleotide bonds are phosphorothioate bonds (PS)
  modified_base (1)..(2): LNA nucleoside
  modified_base (13)..(15): LNA nucleoside
cctgtaattcacaca

SEQ ID NO: 934 - DNA, 16 bp, Artificial Sequence
  oligonucleotide - internucleotide bonds are phosphorothioate bonds (PS)
  modified_base (1)..(3): LNA nucleoside
  modified_base (13)..(16): LNA nucleoside
ctaattatggaaaaca

SEQ ID NO: 935 - DNA, 16 bp, Artificial Sequence
  oligonucleotide - internucleotide bonds are phosphorothioate bonds (PS)
  modified_base (1)..(4): LNA nucleoside
  modified_base (13)..(16): LNA nucleoside
ctaattatggaaaaca

SEQ ID NO: 936 - DNA, 16 bp, Artificial Sequence
  oligonucleotide - internucleotide bonds are phosphorothioate bonds (PS)
  modified_base (1)..(4): LNA nucleoside
  modified_base (14)..(16): LNA nucleoside
ctaattatggaaaaca

SEQ ID NO: 937 - DNA, 17 bp, Artificial Sequence
  oligonucleotide - internucleotide bonds are phosphorothioate bonds (PS)
  modified_base (1)..(4): LNA nucleoside
  modified_base (14)..(17): LNA nucleoside
cctaattatggaaaaca

SEQ ID NO: 938 - DNA, 17 bp, Artificial Sequence
  oligonucleotide - internucleotide bonds are phosphorothioate bonds (PS)
  modified_base (1)..(3): LNA nucleoside
  modified_base (15)..(17): LNA nucleoside
cctaattatggaaaaca

SEQ ID NO: 939 - DNA, 17 bp, Artificial Sequence
  oligonucleotide - internucleotide bonds are phosphorothioate bonds (PS)
  modified_base (1)..(4): LNA nucleoside
  modified_base (15)..(17): LNA nucleoside
cctaattatggaaaaca

SEQ ID NO: 940 - DNA, 16 bp, Artificial Sequence
  oligonucleotide - internucleotide bonds are phosphorothioate bonds (PS)
  modified_base (1)..(4): LNA nucleoside
  modified_base (14)..(16): LNA nucleoside
tctttgtaaatgaaaa

SEQ ID NO: 941 - DNA, 16 bp, Artificial Sequence
  oligonucleotide - internucleotide bonds are phosphorothioate bonds (PS)
  modified_base (1)..(4): LNA nucleoside
  modified_base (13)..(16): LNA nucleoside
tctttgtaaatgaaaa

SEQ ID NO: 942 - DNA, 16 bp, Artificial Sequence
  oligonucleotide - internucleotide bonds are phosphorothioate bonds (PS)
  modified_base (1)..(3): LNA nucleoside
  modified_base (13)..(16): LNA nucleoside
tctttgtaaatgaaaa

SEQ ID NO: 943 - DNA, 15 bp, Artificial Sequence
  oligonucleotide - internucleotide bonds are phosphorothioate bonds (PS)
  modified_base (1)..(4): LNA nucleoside
  modified_base (12)..(15): LNA nucleoside
cctaattatggaaaa

SEQ ID NO: 944 - DNA, 15 bp, Artificial Sequence
  oligonucleotide - internucleotide bonds are phosphorothioate bonds (PS)
  modified_base (1)..(3): LNA nucleoside
  modified_base (12)..(15): LNA nucleoside
cctaattatggaaaa

SEQ ID NO: 945 - DNA, 15 bp, Artificial Sequence
  oligonucleotide - internucleotide bonds are phosphorothioate bonds (PS)
  modified_base (1)..(4): LNA nucleoside
  modified_base (13)..(15): LNA nucleoside
cctaattatggaaaa

SEQ ID NO: 946 - DNA, 14 bp, Artificial Sequence
  oligonucleotide - internucleotide bonds are phosphorothioate bonds (PS)
  modified_base (1)..(3): LNA nucleoside
  modified_base (12)..(14): LNA nucleoside
tttggcttcccact

SEQ ID NO: 947 - DNA, 14 bp, Artificial Sequence
  oligonucleotide - internucleotide bonds are phosphorothioate bonds (PS)
  modified_base (1)..(4): LNA nucleoside
  modified_base (11)..(14): LNA nucleoside
tttggcttcccact

SEQ ID NO: 948 - DNA, 14 bp, Artificial Sequence
  oligonucleotide - internucleotide bonds are phosphorothioate bonds (PS)
  modified_base (1)..(2): LNA nucleoside
  modified_base (13)..(14): LNA nucleoside
tttggcttcccact

SEQ ID NO: 949 - DNA, 15 bp, Artificial Sequence
  oligonucleotide - internucleotide bonds are phosphorothioate bonds (PS)
  modified_base (1)..(2): LNA nucleoside
  modified_base (14)..(15): LNA nucleoside
atttggcttcccact

SEQ ID NO: 950 - DNA, 15 bp, Artificial Sequence
  oligonucleotide - internucleotide bonds are phosphorothioate bonds (PS)
  modified_base (1)..(3): LNA nucleoside
  modified_base (14)..(15): LNA nucleoside
atttggcttcccact

SEQ ID NO: 951 - DNA, 15 bp, Artificial Sequence
  oligonucleotide - internucleotide bonds are phosphorothioate bonds (PS)
  modified_base (1)..(3): LNA nucleoside
  modified_base (12)..(15): LNA nucleoside
atttggcttcccact

SEQ ID NO: 952 - DNA, 15 bp, Artificial Sequence
  oligonucleotide - internucleotide bonds are phosphorothioate bonds (PS)
  modified_base (1)..(4): LNA nucleoside
  modified_base (13)..(15): LNA nucleoside
tttggcttcccactg

SEQ ID NO: 953 - DNA, 15 bp, Artificial Sequence
  oligonucleotide - internucleotide bonds are phosphorothioate bonds (PS)
  modified_base (1)..(2): LNA nucleoside
  modified_base (14)..(15): LNA nucleoside
tttggcttcccactg

SEQ ID NO: 954 - DNA, 15 bp, Artificial Sequence
  oligonucleotide - internucleotide bonds are phosphorothioate bonds (PS)
  modified_base (1)..(3): LNA nucleoside
  modified_base (14)..(15): LNA nucleoside
tttggcttcccactg

SEQ ID NO: 955 - DNA, 16 bp, Artificial Sequence
  oligonucleotide - internucleotide bonds are phosphorothioate bonds (PS)
  modified_base (1)..(2): LNA nucleoside
  modified_base (15)..(16): LNA nucleoside
atttggcttcccactg

SEQ ID NO: 956 - DNA, 16 bp, Artificial Sequence
  oligonucleotide - internucleotide bonds are phosphorothioate bonds (PS)
  modified_base (1)..(3): LNA nucleoside
  modified_base (13)..(16): LNA nucleoside
atttggcttcccactg

SEQ ID NO: 957 - DNA, 16 bp, Artificial Sequence
  oligonucleotide - internucleotide bonds are phosphorothioate bonds (PS)
  modified_base (1)..(3): LNA nucleoside
  modified_base (15)..(16): LNA nucleoside
atttggcttcccactg

SEQ ID NO: 958 - DNA, 14 bp, Artificial Sequence
  oligonucleotide - internucleotide bonds are phosphorothioate bonds (PS)
  modified_base (1)..(3): LNA nucleoside
  modified_base (13)..(14): LNA nucleoside
atttggcttcccac

SEQ ID NO: 959 - DNA, 14 bp, Artificial Sequence
  oligonucleotide - internucleotide bonds are phosphorothioate bonds (PS)
  modified_base (1)..(4): LNA nucleoside
  modified_base (12)..(14): LNA nucleoside
atttggcttcccac

SEQ ID NO: 960 - DNA, 14 bp, Artificial Sequence
  oligonucleotide - internucleotide bonds are phosphorothioate bonds (PS)
  modified_base (1)..(4): LNA nucleoside
  modified_base (11)..(14): LNA nucleoside
atttggcttcccac

SEQ ID NO: 961 - DNA, 17 bp, Artificial Sequence
  oligonucleotide - internucleotide bonds are phosphorothioate bonds (PS)
  modified_base (1)..(2): LNA nucleoside
  modified_base (16)..(17): LNA nucleoside
tctcttctccttctctt

SEQ ID NO: 962 - DNA, 17 bp, Artificial Sequence
  oligonucleotide - internucleotide bonds are phosphorothioate bonds (PS)
  modified_base (1)..(4): LNA nucleoside
  modified_base (16)..(17): LNA nucleoside
tctcttctccttctctt

SEQ ID NO: 963 - DNA, 17 bp, Artificial Sequence
  oligonucleotide - internucleotide bonds are phosphorothioate bonds (PS)
  modified_base (1)..(3): LNA nucleoside
  modified_base (16)..(17): LNA nucleoside
tctcttctccttctctt

SEQ ID NO: 964 - DNA, 14 bp, Artificial Sequence
  oligonucleotide - internucleotide bonds are phosphorothioate bonds (PS)
  modified_base (1)..(2): LNA nucleoside
  modified_base (12)..(14): LNA nucleoside
tggatgactgtctg

SEQ ID NO: 965 - DNA, 14 bp, Artificial Sequence
  oligonucleotide - internucleotide bonds are phosphorothioate bonds (PS)
  modified_base (1)..(4): LNA nucleoside
  modified_base (11)..(14): LNA nucleoside
tggatgactgtctg

SEQ ID NO: 966 - DNA, 14 bp, Artificial Sequence
  oligonucleotide - internucleotide bonds are phosphorothioate bonds (PS)
  modified_base (1)..(4): LNA nucleoside
  modified_base (12)..(14): LNA nucleoside
tggatgactgtctg

SEQ ID NO: 967 - DNA, 17 bp, Artificial Sequence
  oligonucleotide - internucleotide bonds are phosphorothioate bonds (PS)
  modified_base (1)..(2): LNA nucleoside
  modified_base (15)..(17): LNA nucleoside
ctcttctccttctcttc

SEQ ID NO: 968 - DNA, 17 bp, Artificial Sequence
  oligonucleotide - internucleotide bonds are phosphorothioate bonds (PS)
  modified_base (1)..(3): LNA nucleoside
  modified_base (15)..(17): LNA nucleoside
ctcttctccttctcttc

SEQ ID NO: 969 - DNA, 17 bp, Artificial Sequence
  oligonucleotide - internucleotide bonds are phosphorothioate bonds (PS)
  modified_base (1)..(2): LNA nucleoside
  modified_base (16)..(17): LNA nucleoside
ctcttctccttctcttc

SEQ ID NO: 970 - DNA, 18 bp, Artificial Sequence
  oligonucleotide - internucleotide bonds are phosphorothioate bonds (PS)
  modified_base (1)..(2): LNA nucleoside
  modified_base (17)..(18): LNA nucleoside
tctcttctccttctcttc

SEQ ID NO: 971 - DNA, 18 bp, Artificial Sequence
  oligonucleotide - internucleotide bonds are phosphorothioate bonds (PS)
  modified_base (1)..(3): LNA nucleoside
  modified_base (17)..(18): LNA nucleoside
tctcttctccttctcttc

SEQ ID NO: 972 - DNA, 18 bp, Artificial Sequence
  oligonucleotide - internucleotide bonds are phosphorothioate bonds (PS)
  modified_base (1)..(2): LNA nucleoside
  modified_base (16)..(18): LNA nucleoside
tctcttctccttctcttc

SEQ ID NO: 973 - DNA, 14 bp, Artificial Sequence
  oligonucleotide - internucleotide bonds are phosphorothioate bonds (PS)
  modified_base (1)..(2): LNA nucleoside
  modified_base (13)..(14): LNA nucleoside
gggtttggaactgg

SEQ ID NO: 974 - DNA, 14 bp, Artificial Sequence
  oligonucleotide - internucleotide bonds are phosphorothioate bonds (PS)
  modified_base (1)..(4): LNA nucleoside
  modified_base (11)..(14): LNA nucleoside
gggtttggaactgg

SEQ ID NO: 975 - DNA, 14 bp, Artificial Sequence
  oligonucleotide - internucleotide bonds are phosphorothioate bonds (PS)
  modified_base (1)..(3): LNA nucleoside
  modified_base (12)..(14): LNA nucleoside
gggtttggaactgg

SEQ ID NO: 976 - DNA, 14 bp, Artificial Sequence
  oligonucleotide - internucleotide bonds are phosphorothioate bonds (PS)
  modified_base (1)..(4): LNA nucleoside
  modified_base (11)..(14): LNA nucleoside
tgggttgatgagag

SEQ ID NO: 977 - DNA, 14 bp, Artificial Sequence
  oligonucleotide - internucleotide bonds are phosphorothioate bonds (PS)
  modified_base (1)..(3): LNA nucleoside
  modified_base (11)..(14): LNA nucleoside
tgggttgatgagag

SEQ ID NO: 978 - DNA, 14 bp, Artificial Sequence
  oligonucleotide - internucleotide bonds are phosphorothioate bonds (PS)
  modified_base (1)..(3): LNA nucleoside
  modified_base (13)..(14): LNA nucleoside
tgggttgatgagag

SEQ ID NO: 979 - DNA, 14 bp, Artificial Sequence
  oligonucleotide - internucleotide bonds are phosphorothioate bonds (PS)
  modified_base (1)..(3): LNA nucleoside
  modified_base (11)..(14): LNA nucleoside
ggttgatgagagag

SEQ ID NO: 980 - DNA, 14 bp, Artificial Sequence
  oligonucleotide - internucleotide bonds are phosphorothioate bonds (PS)
  modified_base (1)..(4): LNA nucleoside
  modified_base (11)..(14): LNA nucleoside
ggttgatgagagag

SEQ ID NO: 981 - DNA, 14 bp, Artificial Sequence
  oligonucleotide - internucleotide bonds are phosphorothioate bonds (PS)
  modified_base (1)..(2): LNA nucleoside
  modified_base (11)..(14): LNA nucleoside
ggttgatgagagag

SEQ ID NO: 982 - DNA, 15 bp, Artificial Sequence
  oligonucleotide - internucleotide bonds are phosphorothioate bonds (PS)
  modified_base (1)..(4): LNA nucleoside
  modified_base (12)..(15): LNA nucleoside
gggttgatgagagag

SEQ ID NO: 983 - DNA, 15 bp, Artificial Sequence
  oligonucleotide - internucleotide bonds are phosphorothioate bonds (PS)
  modified_base (1)..(2): LNA nucleoside
  modified_base (14)..(15): LNA nucleoside
gggttgatgagagag

SEQ ID NO: 984 - DNA, 15 bp, Artificial Sequence
  oligonucleotide - internucleotide bonds are phosphorothioate bonds (PS)
  modified_base (1)..(2): LNA nucleoside
  modified_base (12)..(15): LNA nucleoside
gggttgatgagagag

SEQ ID NO: 985 - DNA, 16 bp, Artificial Sequence
  oligonucleotide - internucleotide bonds are phosphorothioate bonds (PS)
  modified_base (1)..(2): LNA nucleoside
  modified_base (15)..(16): LNA nucleoside
tgggttgatgagagag

SEQ ID NO: 986 - DNA, 16 bp, Artificial Sequence
  oligonucleotide - internucleotide bonds are phosphorothioate bonds (PS)
  modified_base (1)..(4): LNA nucleoside
  modified_base (15)..(16): LNA nucleoside
tgggttgatgagagag

SEQ ID NO: 987 - DNA, 16 bp, Artificial Sequence
  oligonucleotide - internucleotide bonds are phosphorothioate bonds (PS)
  modified_base (1)..(3): LNA nucleoside
  modified_base (13)..(16): LNA nucleoside
tgggttgatgagagag

SEQ ID NO: 988 - DNA, 15 bp, Artificial Sequence
  oligonucleotide - internucleotide bonds are phosphorothioate bonds (PS)
  modified_base (1)..(2): LNA nucleoside
  modified_base (13)..(15): LNA nucleoside
gtctcaggcctgggc

SEQ ID NO: 989 - DNA, 15 bp, Artificial Sequence
  oligonucleotide - internucleotide bonds are phosphorothioate bonds (PS)
  modified_base (1)..(3): LNA nucleoside
  modified_base (14)..(15): LNA nucleoside
gtctcaggcctgggc

SEQ ID NO: 990 - DNA, 15 bp, Artificial Sequence
  oligonucleotide - internucleotide bonds are phosphorothioate bonds (PS)
  modified_base (1)..(2): LNA nucleoside
  modified_base (14)..(15): LNA nucleoside
gtctcaggcctgggc

SEQ ID NO: 991 - DNA, 14 bp, Artificial Sequence
  oligonucleotide - internucleotide bonds are phosphorothioate bonds (PS)
  modified_base (1)..(2): LNA nucleoside
  modified_base (13)..(14): LNA nucleoside
tgcccagaatctcc

SEQ ID NO: 992 - DNA, 14 bp, Artificial Sequence
  oligonucleotide - internucleotide bonds are phosphorothioate bonds (PS)
  modified_base (1)..(3): LNA nucleoside
  modified_base (12)..(14): LNA nucleoside
tgcccagaatctcc

SEQ ID NO: 993 - DNA, 14 bp, Artificial Sequence
  oligonucleotide - internucleotide bonds are phosphorothioate bonds (PS)
  modified_base (1)..(2): LNA nucleoside
  modified_base (12)..(14): LNA nucleoside
tgcccagaatctcc

SEQ ID NO: 994 - DNA, 14 bp, Artificial Sequence
  oligonucleotide - internucleotide bonds are phosphorothioate bonds (PS)
  modified_base (1)..(3): LNA nucleoside
  modified_base (13)..(14): LNA nucleoside
gggttgatgagaga

SEQ ID NO: 995 - DNA, 14 bp, Artificial Sequence
  oligonucleotide - internucleotide bonds are phosphorothioate bonds (PS)
  modified_base (1)..(4): LNA nucleoside
  modified_base (12)..(14): LNA nucleoside
gggttgatgagaga

SEQ ID NO: 996 - DNA, 14 bp, Artificial Sequence
  oligonucleotide - internucleotide bonds are phosphorothioate bonds (PS)
  modified_base (1)..(4): LNA nucleoside
  modified_base (11)..(14): LNA nucleoside
gggttgatgagaga

SEQ ID NO: 997 - DNA, 15 bp, Artificial Sequence
  oligonucleotide - internucleotide bonds are phosphorothioate bonds (PS)
  modified_base (1)..(3): LNA nucleoside
  modified_base (13)..(15): LNA nucleoside
tgggttgatgagaga

SEQ ID NO: 998 - DNA, 15 bp, Artificial Sequence
  oligonucleotide - internucleotide bonds are phosphorothioate bonds (PS)
  modified_base (1)..(4): LNA nucleoside
  modified_base (12)..(15): LNA nucleoside
tgggttgatgagaga

SEQ ID NO: 999 - DNA, 15 bp, Artificial Sequence
  oligonucleotide - internucleotide bonds are phosphorothioate bonds (PS)
  modified_base (1)..(2): LNA nucleoside
  modified_base (13)..(15): LNA nucleoside
tgggttgatgagaga

SEQ ID NO: 1000 - DNA, 15 bp, Artificial Sequence
  oligonucleotide - internucleotide bonds are phosphorothioate bonds (PS)
  modified_base (1)..(2): LNA nucleoside
  modified_base (13)..(15): LNA nucleoside
cctctcccagtgtct

SEQ ID NO: 1001 - DNA, 15 bp, Artificial Sequence
  oligonucleotide - internucleotide bonds are phosphorothioate bonds (PS)
  modified_base (1)..(2): LNA nucleoside
  modified_base (14)..(15): LNA nucleoside
cctctcccagtgtct

SEQ ID NO: 1002 - DNA, 15 bp, Artificial Sequence
  oligonucleotide - internucleotide bonds are phosphorothioate bonds (PS)
  modified_base (1)..(3): LNA nucleoside
  modified_base (14)..(15): LNA nucleoside
cctctcccagtgtct

SEQ ID NO: 1003 - DNA, 14 bp, Artificial Sequence
  oligonucleotide - internucleotide bonds are phosphorothioate bonds (PS)
  modified_base (1)..(3): LNA nucleoside
  modified_base (11)..(14): LNA nucleoside
ctttctgaaggttg

SEQ ID NO: 1004 - DNA, 14 bp, Artificial Sequence
  oligonucleotide - internucleotide bonds are phosphorothioate bonds (PS)
  modified_base (1)..(2): LNA nucleoside
  modified_base (11)..(14): LNA nucleoside
ctttctgaaggttg

SEQ ID NO: 1005 - DNA, 14 bp, Artificial Sequence
  oligonucleotide - internucleotide bonds are phosphorothioate bonds (PS)
  modified_base (1)..(4): LNA nucleoside
  modified_base (11)..(14): LNA nucleoside
ctttctgaaggttg

SEQ ID NO: 1006 - DNA, 14 bp, Artificial Sequence
  oligonucleotide - internucleotide bonds are phosphorothioate bonds (PS)
  modified_base (1)..(3): LNA nucleoside
  modified_base (13)..(14): LNA nucleoside
gggcccttccatgg

SEQ ID NO: 1007 - DNA, 14 bp, Artificial Sequence
  oligonucleotide - internucleotide bonds are phosphorothioate bonds (PS)
  modified_base (1)..(2): LNA nucleoside
  modified_base (12)..(14): LNA nucleoside
gggcccttccatgg

SEQ ID NO: 1008 - DNA, 14 bp, Artificial Sequence
  oligonucleotide - internucleotide bonds are phosphorothioate bonds (PS)
  modified_base (1)..(2): LNA nucleoside
  modified_base (13)..(14): LNA nucleoside
gggcccttccatgg

SEQ ID NO: 1009 - DNA, 20 bp, Artificial Sequence
  oligonucleotide - internucleotide bonds are phosphorothioate bonds (PS)
  modified_base (1)..(2): LNA nucleoside
  modified_base (19)..(20): LNA nucleoside
gaaactgaggctcaaagaag

SEQ ID NO: 1010 - DNA, 20 bp, Artificial Sequence
  oligonucleotide - internucleotide bonds are phosphorothioate bonds (PS)
  modified_base (1)..(4): LNA nucleoside
  modified_base (17)..(20): LNA nucleoside
gaaactgaggctcaaagaag

SEQ ID NO: 1011 - DNA, 20 bp, Artificial Sequence
  oligonucleotide - internucleotide bonds are phosphorothioate bonds (PS)
  modified_base (1)..(4): LNA nucleoside
  modified_base (18)..(20): LNA nucleoside
gaaactgaggctcaaagaag

SEQ ID NO: 1012 - DNA, 15 bp, Artificial Sequence
  oligonucleotide - internucleotide bonds are phosphorothioate bonds (PS)
  modified_base (1)..(4): LNA nucleoside
  modified_base (14)..(15): LNA nucleoside
ctgggcagataaaag

SEQ ID NO: 1013 - DNA, 15 bp, Artificial Sequence
  oligonucleotide - internucleotide bonds are phosphorothioate bonds (PS)
  modified_base (1)..(4): LNA nucleoside
  modified_base (12)..(15): LNA nucleoside
ctgggcagataaaag

SEQ ID NO: 1014 - DNA, 15 bp, Artificial Sequence
  oligonucleotide - internucleotide bonds are phosphorothioate bonds (PS)
  modified_base (1)..(4): LNA nucleoside
  modified_base (13)..(15): LNA nucleoside
ctgggcagataaaag

SEQ ID NO: 1015 - DNA, 15 bp, Artificial Sequence
  oligonucleotide - internucleotide bonds are phosphorothioate bonds (PS)
  modified_base (1)..(2): LNA nucleoside
  modified_base (14)..(15): LNA nucleoside
tttttccatccatcc

SEQ ID NO: 1016 - DNA, 15 bp, Artificial Sequence
  oligonucleotide - internucleotide bonds are phosphorothioate bonds (PS)
  modified_base (1)..(2): LNA nucleoside
  modified_base (12)..(15): LNA nucleoside
tttttccatccatcc

SEQ ID NO: 1017 - DNA, 15 bp, Artificial Sequence
  oligonucleotide - internucleotide bonds are phosphorothioate bonds (PS)
  modified_base (1)..(4): LNA nucleoside
  modified_base (12)..(15): LNA nucleoside
tttttccatccatcc

SEQ ID NO: 1018 - DNA, 15 bp, Artificial Sequence
  oligonucleotide - internucleotide bonds are phosphorothioate bonds (PS)
  modified_base (1)..(2): LNA nucleoside
  modified_base (14)..(15): LNA nucleoside
ctctcccagtgtcta

SEQ ID NO: 1019 - DNA, 15 bp, Artificial Sequence
  oligonucleotide - internucleotide bonds are phosphorothioate bonds (PS)
  modified_base (1)..(2): LNA nucleoside
  modified_base (12)..(15): LNA nucleoside
ctctcccagtgtcta

SEQ ID NO: 1020 - DNA, 15 bp, Artificial Sequence
  oligonucleotide - internucleotide bonds are phosphorothioate bonds (PS)
  modified_base (1)..(3): LNA nucleoside
  modified_base (14)..(15): LNA nucleoside
ctctcccagtgtcta

SEQ ID NO: 1021 - DNA, 16 bp, Artificial Sequence
  oligonucleotide - internucleotide bonds are phosphorothioate bonds (PS)
  modified_base (1)..(2): LNA nucleoside
  modified_base (14)..(16): LNA nucleoside
cctctcccagtgtcta

SEQ ID NO: 1022 - DNA, 16 bp, Artificial Sequence
  oligonucleotide - internucleotide bonds are phosphorothioate bonds (PS)
  modified_base (1)..(2): LNA nucleoside
  modified_base (15)..(16): LNA nucleoside
cctctcccagtgtcta

SEQ ID NO: 1023 - DNA, 16 bp, Artificial Sequence
  oligonucleotide - internucleotide bonds are phosphorothioate bonds (PS)
  modified_base (1)..(3): LNA nucleoside
  modified_base (15)..(16): LNA nucleoside
cctctcccagtgtcta

SEQ ID NO: 1024 - DNA, 14 bp, Artificial Sequence
  oligonucleotide - internucleotide bonds are phosphorothioate bonds (PS)
  modified_base (1)..(4): LNA nucleoside
  modified_base (12)..(14): LNA nucleoside
tcaggagctaagaa

SEQ ID NO: 1025 - DNA, 14 bp, Artificial Sequence
  oligonucleotide - internucleotide bonds are phosphorothioate bonds (PS)
  modified_base (1)..(4): LNA nucleoside
  modified_base (11)..(14): LNA nucleoside
tcaggagctaagaa

SEQ ID NO: 1026 - DNA, 14 bp, Artificial Sequence
  oligonucleotide - internucleotide bonds are phosphorothioate bonds (PS)
  modified_base (1)..(3): LNA nucleoside
  modified_base (11)..(14): LNA nucleoside
tcaggagctaagaa

SEQ ID NO: 1027 - DNA, 14 bp, Artificial Sequence
  oligonucleotide - internucleotide bonds are phosphorothioate bonds (PS)
  modified_base (1)..(4): LNA nucleoside
  modified_base (11)..(14): LNA nucleoside
  modified_base (10)..(10): 5-methyl cytosine
aagaggtgacggct

SEQ ID NO: 1028 - DNA, 14 bp, Artificial Sequence
  oligonucleotide - internucleotide bonds are phosphorothioate bonds (PS)
  modified_base (1)..(3): LNA nucleoside
  modified_base (11)..(14): LNA nucleoside
  modified_base (10)..(10): 5-methyl cytosine
aagaggtgacggct

SEQ ID NO: 1029 - DNA, 14 bp, Artificial Sequence
  oligonucleotide - internucleotide bonds are phosphorothioate bonds (PS)
  modified_base (1)..(3): LNA nucleoside
  modified_base (13)..(14): LNA nucleoside
  modified_base (10)..(10): 5-methyl cytosine
aagaggtgacggct

SEQ ID NO: 1030 - DNA, 15 bp, Artificial Sequence
  oligonucleotide - internucleotide bonds are phosphorothioate bonds (PS)
  modified_base (1)..(4): LNA nucleoside
  modified_base (14)..(15): LNA nucleoside
  modified_base (11)..(11): 5-methyl cytosine
caagaggtgacggct

SEQ ID NO: 1031 - DNA, 15 bp, Artificial Sequence
  oligonucleotide - internucleotide bonds are phosphorothioate bonds (PS)
  modified_base (1)..(2): LNA nucleoside
  modified_base (14)..(15): LNA nucleoside
  modified_base (11)..(11): 5-methyl cytosine
caagaggtgacggct

SEQ ID NO: 1032 - DNA, 15 bp, Artificial Sequence
  oligonucleotide - internucleotide bonds are phosphorothioate bonds (PS)
  modified_base (1)..(3): LNA nucleoside
  modified_base (12)..(15): LNA nucleoside
  modified_base (11)..(11): 5-methyl cytosine
caagaggtgacggct

SEQ ID NO: 1033 - DNA, 14 bp, Artificial Sequence
  oligonucleotide - internucleotide bonds are phosphorothioate bonds (PS)
  modified_base (1)..(3): LNA nucleoside
  modified_base (12)..(14): LNA nucleoside
  modified_base (9)..(9): 5-methyl cytosine
agaggtgacggctg

SEQ ID NO: 1034 - DNA, 14 bp, Artificial Sequence
  oligonucleotide - internucleotide bonds are phosphorothioate bonds (PS)
  modified_base (1)..(3): LNA nucleoside
  modified_base (11)..(14): LNA nucleoside
  modified_base (9)..(9): 5-methyl cytosine
agaggtgacggctg

SEQ ID NO: 1035 - DNA, 14 bp, Artificial Sequence
  oligonucleotide - internucleotide bonds are phosphorothioate bonds (PS)
  modified_base (1)..(2): LNA nucleoside
  modified_base (13)..(14): LNA nucleoside
  modified_base (9)..(9): 5-methyl cytosine
agaggtgacggctg

SEQ ID NO: 1036 - DNA, 15 bp, Artificial Sequence
  oligonucleotide - internucleotide bonds are phosphorothioate bonds (PS)
  modified_base (1)..(4): LNA nucleoside
  modified_base (12)..(15): LNA nucleoside
  modified_base (10)..(10): 5-methyl cytosine
aagaggtgacggctg

SEQ ID NO: 1037 - DNA, 15 bp, Artificial Sequence
  oligonucleotide - internucleotide bonds are phosphorothioate bonds (PS)
  modified_base (1)..(3): LNA nucleoside
  modified_base (14)..(15): LNA nucleoside
  modified_base (10)..(10): 5-methyl cytosine
aagaggtgacggctg

SEQ ID NO: 1038 - DNA, 15 bp, Artificial Sequence
  oligonucleotide - internucleotide bonds are phosphorothioate bonds (PS)
  modified_base (1)..(4): LNA nucleoside
  modified_base (14)..(15): LNA nucleoside
  modified_base (10)..(10): 5-methyl cytosine
aagaggtgacggctg

SEQ ID NO: 1039 - DNA, 16 bp, Artificial Sequence
  oligonucleotide - internucleotide bonds are phosphorothioate bonds (PS)
  modified_base (1)..(2): LNA nucleoside
  modified_base (14)..(16): LNA nucleoside
  modified_base (11)..(11): 5-methyl cytosine
caagaggtgacggctg

SEQ ID NO: 1040 - DNA, 16 bp, Artificial Sequence
  oligonucleotide - internucleotide bonds are phosphorothioate bonds (PS)
  modified_base (1)..(2): LNA nucleoside
  modified_base (15)..(16): LNA nucleoside
  modified_base (11)..(11): 5-methyl cytosine
caagaggtgacggctg

SEQ ID NO: 1041 - DNA, 16 bp, Artificial Sequence
  oligonucleotide - internucleotide bonds are phosphorothioate bonds (PS)
  modified_base (1)..(2): LNA nucleoside
  modified_base (13)..(16): LNA nucleoside
  modified_base (11)..(11): 5-methyl cytosine
caagaggtgacggctg

SEQ ID NO: 1042 - DNA, 14 bp, Artificial Sequence
  oligonucleotide - internucleotide bonds are phosphorothioate bonds (PS)
  modified_base (1)..(2): LNA nucleoside
  modified_base (13)..(14): LNA nucleoside
  modified_base (8)..(8): 5-methyl cytosine
gaggtgacggctgg

SEQ ID NO: 1043 - DNA, 14 bp, Artificial Sequence
  oligonucleotide - internucleotide bonds are phosphorothioate bonds (PS)
  modified_base (1)..(3): LNA nucleoside
  modified_base (12)..(14): LNA nucleoside
  modified_base (8)..(8): 5-methyl cytosine
gaggtgacggctgg

SEQ ID NO: 1044 - DNA, 14 bp, Artificial Sequence
  oligonucleotide - internucleotide bonds are phosphorothioate bonds (PS)
  modified_base (1)..(2): LNA nucleoside
  modified_base (12)..(14): LNA nucleoside
  modified_base (8)..(8): 5-methyl cytosine
gaggtgacggctgg

SEQ ID NO: 1045 - DNA, 15 bp, Artificial Sequence
  oligonucleotide - internucleotide bonds are phosphorothioate bonds (PS)
  modified_base (1)..(2): LNA nucleoside
  modified_base (14)..(15): LNA nucleoside
  modified_base (9)..(9): 5-methyl cytosine
agaggtgacggctgg

SEQ ID NO: 1046 - DNA, 15 bp, Artificial Sequence
  oligonucleotide - internucleotide bonds are phosphorothioate bonds (PS)
  modified_base (1)..(2): LNA nucleoside
  modified_base (13)..(15): LNA nucleoside
  modified_base (9)..(9): 5-methyl cytosine
agaggtgacggctgg

SEQ ID NO: 1047 - DNA, 15 bp, Artificial Sequence
  oligonucleotide - internucleotide bonds are phosphorothioate bonds (PS)
  modified_base (1)..(3): LNA nucleoside
  modified_base (13)..(15): LNA nucleoside
  modified_base (9)..(9): 5-methyl cytosine
agaggtgacggctgg

SEQ ID NO: 1048 - DNA, 16 bp, Artificial Sequence
  oligonucleotide - internucleotide bonds are phosphorothioate bonds (PS)
  modified_base (1)..(3): LNA nucleoside
  modified_base (13)..(16): LNA nucleoside
  modified_base (10)..(10): 5-methyl cytosine
aagaggtgacggctgg

SEQ ID NO: 1049 - DNA, 16 bp, Artificial Sequence
  oligonucleotide - internucleotide bonds are phosphorothioate bonds (PS)
  modified_base (1)..(2): LNA nucleoside
  modified_base (15)..(16): LNA nucleoside
  modified_base (10)..(10): 5-methyl cytosine
aagaggtgacggctgg

SEQ ID NO: 1050 - DNA, 16 bp, Artificial Sequence
  oligonucleotide - internucleotide bonds are phosphorothioate bonds (PS)
  modified_base (1)..(2): LNA nucleoside
  modified_base (14)..(16): LNA nucleoside
  modified_base (10)..(10): 5-methyl cytosine
aagaggtgacggctgg

SEQ ID NO: 1051 - DNA, 17 bp, Artificial Sequence
  oligonucleotide - internucleotide bonds are phosphorothioate bonds (PS)
  modified_base (1)..(4): LNA nucleoside
  modified_base (16)..(17): LNA nucleoside
  modified_base (11)..(11): 5-methyl cytosine
caagaggtgacggctgg

SEQ ID NO: 1052 - DNA, 17 bp, Artificial Sequence
  oligonucleotide - internucleotide bonds are phosphorothioate bonds (PS)
  modified_base (1)..(3): LNA nucleoside
  modified_base (16)..(17): LNA nucleoside
  modified_base (11)..(11): 5-methyl cytosine
caagaggtgacggctgg

SEQ ID NO: 1053 - DNA, 17 bp, Artificial Sequence
  oligonucleotide - internucleotide bonds are phosphorothioate bonds (PS)
  modified_base (1)..(2): LNA nucleoside
  modified_base (16)..(17): LNA nucleoside
  modified_base (11)..(11): 5-methyl cytosine
caagaggtgacggctgg

SEQ ID NO: 1054 - DNA, 14 bp, Artificial Sequence
  oligonucleotide - internucleotide bonds are phosphorothioate bonds (PS)
  modified_base (1)..(2): LNA nucleoside
  modified_base (11)..(14): LNA nucleoside
caagaggtgacggc

SEQ ID NO: 1055 - DNA, 14 bp, Artificial Sequence
  oligonucleotide - internucleotide bonds are phosphorothioate bonds (PS)
  modified_base (1)..(2): LNA nucleoside
  modified_base (13)..(14): LNA nucleoside
  modified_base (11)..(11): 5-methyl cytosine
caagaggtgacggc

SEQ ID NO: 1056 - DNA, 14 bp, Artificial Sequence
  oligonucleotide - internucleotide bonds are phosphorothioate bonds (PS)
  modified_base (1)..(4): LNA nucleoside
  modified_base (11)..(14): LNA nucleoside
caagaggtgacggc

SEQ ID NO: 1057 - DNA, 14 bp, Artificial Sequence
  oligonucleotide - internucleotide bonds are phosphorothioate bonds (PS)
  modified_base (1)..(4): LNA nucleoside
  modified_base (13)..(14): LNA nucleoside
ccagggcttcatca

SEQ ID NO: 1058 - DNA, 14 bp, Artificial Sequence
  oligonucleotide - internucleotide bonds are phosphorothioate bonds (PS)
  modified_base (1)..(2): LNA nucleoside
  modified_base (13)..(14): LNA nucleoside
ccagggcttcatca

SEQ ID NO: 1059 - DNA, 14 bp, Artificial Sequence
  oligonucleotide - internucleotide bonds are phosphorothioate bonds (PS)
  modified_base (1)..(2): LNA nucleoside
  modified_base (12)..(14): LNA nucleoside
ccagggcttcatca

SEQ ID NO: 1060 - DNA, 14 bp, Artificial Sequence
  oligonucleotide - internucleotide bonds are phosphorothioate bonds (PS)
  modified_base (1)..(4): LNA nucleoside
  modified_base (12)..(14): LNA nucleoside
tacacagtagtgtg

SEQ ID NO: 1061 - DNA, 14 bp, Artificial Sequence
  oligonucleotide - internucleotide bonds are phosphorothioate bonds (PS)
  modified_base (1)..(3): LNA nucleoside
  modified_base (11)..(14): LNA nucleoside
tacacagtagtgtg

SEQ ID NO: 1062 - DNA, 14 bp, Artificial Sequence
  oligonucleotide - internucleotide bonds are phosphorothioate bonds (PS)
  modified_base (1)..(4): LNA nucleoside
  modified_base (11)..(14): LNA nucleoside
tacacagtagtgtg

SEQ ID NO: 1063 - DNA, 14 bp, Artificial Sequence
  oligonucleotide - internucleotide bonds are phosphorothioate bonds (PS)
  modified_base (1)..(2): LNA nucleoside
  modified_base (12)..(14): LNA nucleoside
gagccatgcccatc

SEQ ID NO: 1064 - DNA, 14 bp, Artificial Sequence
  oligonucleotide - internucleotide bonds are phosphorothioate bonds (PS)
  modified_base (1)..(2): LNA nucleoside
  modified_base (11)..(14): LNA nucleoside
gagccatgcccatc

SEQ ID NO: 1065 - DNA, 14 bp, Artificial Sequence
  oligonucleotide - internucleotide bonds are phosphorothioate bonds (PS)
  modified_base (1)..(2): LNA nucleoside
  modified_base (13)..(14): LNA nucleoside
gagccatgcccatc

SEQ ID NO: 1066 - DNA, 15 bp, Artificial Sequence
  oligonucleotide - internucleotide bonds are phosphorothioate bonds (PS)
  modified_base (1)..(2): LNA nucleoside
  modified_base (13)..(15): LNA nucleoside
ggagccatgcccatc

SEQ ID NO: 1067 - DNA, 15 bp, Artificial Sequence
  oligonucleotide - internucleotide bonds are phosphorothioate bonds (PS)
  modified_base (1)..(2): LNA nucleoside
  modified_base (14)..(15): LNA nucleoside
ggagccatgcccatc

SEQ ID NO: 1068 - DNA, 15 bp, Artificial Sequence
  oligonucleotide - internucleotide bonds are phosphorothioate bonds (PS)
  modified_base (1)..(3): LNA nucleoside
  modified_base (14)..(15): LNA nucleoside
ggagccatgcccatc

SEQ ID NO: 1069 - DNA, 14 bp, Artificial Sequence
  oligonucleotide - internucleotide bonds are phosphorothioate bonds (PS)
  modified_base (1)..(4): LNA nucleoside
  modified_base (11)..(14): LNA nucleoside
catctttggactgc

SEQ ID NO: 1070 - DNA, 14 bp, Artificial Sequence
  oligonucleotide - internucleotide bonds are phosphorothioate bonds (PS)
  modified_base (1)..(3): LNA nucleoside
  modified_base (13)..(14): LNA nucleoside
catctttggactgc

SEQ ID NO: 1071 - DNA, 14 bp, Artificial Sequence
  oligonucleotide - internucleotide bonds are phosphorothioate bonds (PS)
  modified_base (1)..(4): LNA nucleoside
  modified_base (12)..(14): LNA nucleoside
catctttggactgc

SEQ ID NO: 1072 - DNA, 14 bp, Artificial Sequence
  oligonucleotide - internucleotide bonds are phosphorothioate bonds (PS)
  modified_base (1)..(4): LNA nucleoside
  modified_base (13)..(14): LNA nucleoside
atctctatcctggc

SEQ ID NO: 1073 - DNA, 14 bp, Artificial Sequence
  oligonucleotide - internucleotide bonds are phosphorothioate bonds (PS)
  modified_base (1)..(4): LNA nucleoside
  modified_base (11)..(14): LNA nucleoside
atctctatcctggc

SEQ ID NO: 1074 - DNA, 14 bp, Artificial Sequence
  oligonucleotide - internucleotide bonds are phosphorothioate bonds (PS)
  modified_base (1)..(2): LNA nucleoside
  modified_base (13)..(14): LNA nucleoside
atctctatcctggc

SEQ ID NO: 1075 - DNA, 15 bp, Artificial Sequence
  oligonucleotide - internucleotide bonds are phosphorothioate bonds (PS)
  modified_base (1)..(2): LNA nucleoside
  modified_base (13)..(15): LNA nucleoside
gagccatgcccatcc

SEQ ID NO: 1076 - DNA, 15 bp, Artificial Sequence
  oligonucleotide - internucleotide bonds are phosphorothioate bonds (PS)
  modified_base (1)..(2): LNA nucleoside
  modified_base (14)..(15): LNA nucleoside
gagccatgcccatcc

SEQ ID NO: 1077 - DNA, 15 bp, Artificial Sequence
  oligonucleotide - internucleotide bonds are phosphorothioate bonds (PS)
  modified_base (1)..(3): LNA nucleoside
  modified_base (14)..(15): LNA nucleoside
gagccatgcccatcc

SEQ ID NO: 1078 - DNA, 16 bp, Artificial Sequence
  oligonucleotide - internucleotide bonds are phosphorothioate bonds (PS)
  modified_base (1)..(2): LNA nucleoside
  modified_base (13)..(16): LNA nucleoside
ggagccatgcccatcc

SEQ ID NO: 1079 - DNA, 16 bp, Artificial Sequence
  oligonucleotide - internucleotide bonds are phosphorothioate bonds (PS)
  modified_base (1)..(2): LNA nucleoside
  modified_base (14)..(16): LNA nucleoside
ggagccatgcccatcc

SEQ ID NO: 1080 - DNA, 16 bp, Artificial Sequence
  oligonucleotide - internucleotide bonds are phosphorothioate bonds (PS)
  modified_base (1)..(2): LNA nucleoside
  modified_base (15)..(16): LNA nucleoside
ggagccatgcccatcc

SEQ ID NO: 1081 - DNA, 15 bp, Artificial Sequence
  oligonucleotide - internucleotide bonds are phosphorothioate bonds (PS)
  modified_base (1)..(3): LNA nucleoside
  modified_base (13)..(15): LNA nucleoside
agagttaggagaaga

SEQ ID NO: 1082 - DNA, 15 bp, Artificial Sequence
  oligonucleotide - internucleotide bonds are phosphorothioate bonds (PS)
  modified_base (1)..(4): LNA nucleoside
  modified_base (12)..(15): LNA nucleoside
agagttaggagaaga

SEQ ID NO: 1083 - DNA, 15 bp, Artificial Sequence
  oligonucleotide - internucleotide bonds are phosphorothioate bonds (PS)
  modified_base (1)..(4): LNA nucleoside
  modified_base (13)..(15): LNA nucleoside
agagttaggagaaga

SEQ ID NO: 1084 - DNA, 14 bp, Artificial Sequence
  oligonucleotide - internucleotide bonds are phosphorothioate bonds (PS)
  modified_base (1)..(3): LNA nucleoside
  modified_base (11)..(14): LNA nucleoside
gatctggctgctaa

SEQ ID NO: 1085 - DNA, 14 bp, Artificial Sequence
  oligonucleotide - internucleotide bonds are phosphorothioate bonds (PS)
  modified_base (1)..(4): LNA nucleoside
  modified_base (11)..(14): LNA nucleoside
gatctggctgctaa

SEQ ID NO: 1086 - DNA, 14 bp, Artificial Sequence
  oligonucleotide - internucleotide bonds are phosphorothioate bonds (PS)
  modified_base (1)..(4): LNA nucleoside
  modified_base (13)..(14): LNA nucleoside
gatctggctgctaa

SEQ ID NO: 1087 - DNA, 15 bp, Artificial Sequence
  oligonucleotide - internucleotide bonds are phosphorothioate bonds (PS)
  modified_base (1)..(3): LNA nucleoside
  modified_base (12)..(15): LNA nucleoside
gcatttgtaaaccaa

SEQ ID NO: 1088 - DNA, 15 bp, Artificial Sequence
  oligonucleotide - internucleotide bonds are phosphorothioate bonds (PS)
  modified_base (1)..(4): LNA nucleoside
  modified_base (12)..(15): LNA nucleoside
gcatttgtaaaccaa

SEQ ID NO: 1089 - DNA, 15 bp, Artificial Sequence
  oligonucleotide - internucleotide bonds are phosphorothioate bonds (PS)
  modified_base (1)..(2): LNA nucleoside
  modified_base (12)..(15): LNA nucleoside
gcatttgtaaaccaa

SEQ ID NO: 1090 - DNA, 14 bp, Artificial Sequence
  oligonucleotide - internucleotide bonds are phosphorothioate bonds (PS)
  modified_base (1)..(4): LNA nucleoside
  modified_base (13)..(14): LNA nucleoside
gagacttggcaaaa

SEQ ID NO: 1091 - DNA, 14 bp, Artificial Sequence
  oligonucleotide - internucleotide bonds are phosphorothioate bonds (PS)
  modified_base (1)..(4): LNA nucleoside
  modified_base (12)..(14): LNA nucleoside
gagacttggcaaaa

SEQ ID NO: 1092 - DNA, 14 bp, Artificial Sequence
  oligonucleotide - internucleotide bonds are phosphorothioate bonds (PS)
  modified_base (1)..(4): LNA nucleoside
  modified_base (11)..(14): LNA nucleoside
gagacttggcaaaa

SEQ ID NO: 1093 - DNA, 14 bp, Artificial Sequence
  oligonucleotide - internucleotide bonds are phosphorothioate bonds (PS)
  modified_base (1)..(4): LNA nucleoside
  modified_base (12)..(14): LNA nucleoside
  modified_base (9)..(9): 5-methyl cytosine
gaggaatacggaag

SEQ ID NO: 1094 - DNA, 14 bp, Artificial Sequence
  oligonucleotide - internucleotide bonds are phosphorothioate bonds (PS)
  modified_base (1)..(4): LNA nucleoside
  modified_base (11)..(14): LNA nucleoside
  modified_base (9)..(9): 5-methyl cytosine
gaggaatacggaag

SEQ ID NO: 1095 - DNA, 14 bp, Artificial Sequence
  oligonucleotide - internucleotide bonds are phosphorothioate bonds (PS)
  modified_base (1)..(3): LNA nucleoside
  modified_base (11)..(14): LNA nucleoside
  modified_base (9)..(9): 5-methyl cytosine
gaggaatacggaag

SEQ ID NO: 1096 - DNA, 15 bp, Artificial Sequence
  oligonucleotide - internucleotide bonds are phosphorothioate bonds (PS)
  modified_base (1)..(3): LNA nucleoside
  modified_base (12)..(15): LNA nucleoside
  modified_base (10)..(10): 5-methyl cytosine
tgaggaatacggaag

SEQ ID NO: 1097 - DNA, 15 bp, Artificial Sequence
  oligonucleotide - internucleotide bonds are phosphorothioate bonds (PS)
  modified_base (1)..(4): LNA nucleoside
  modified_base (12)..(15): LNA nucleoside
  modified_base (10)..(10): 5-methyl cytosine
tgaggaatacggaag

SEQ ID NO: 1098 - DNA, 15 bp, Artificial Sequence
  oligonucleotide - internucleotide bonds are phosphorothioate bonds (PS)
  modified_base (1)..(4): LNA nucleoside
  modified_base (14)..(15): LNA nucleoside
  modified_base (10)..(10): 5-methyl cytosine
tgaggaatacggaag

SEQ ID NO: 1099 - DNA, 14 bp, Artificial Sequence
  oligonucleotide - internucleotide bonds are phosphorothioate bonds (PS)
  modified_base (1)..(3): LNA nucleoside
  modified_base (12)..(14): LNA nucleoside
ccatgatccaattc

SEQ ID NO: 1100 - DNA, 14 bp, Artificial Sequence
  oligonucleotide - internucleotide bonds are phosphorothioate bonds (PS)
  modified_base (1)..(4): LNA nucleoside
  modified_base (11)..(14): LNA nucleoside
ccatgatccaattc

SEQ ID NO: 1101 - DNA, 14 bp, Artificial Sequence
  oligonucleotide - internucleotide bonds are phosphorothioate bonds (PS)
  modified_base (1)..(4): LNA nucleoside
  modified_base (12)..(14): LNA nucleoside
ccatgatccaattc

SEQ ID NO: 1102 - DNA, 14 bp, Artificial Sequence
  oligonucleotide - internucleotide bonds are phosphorothioate bonds (PS)
  modified_base (1)..(4): LNA nucleoside
  modified_base (12)..(14): LNA nucleoside
  modified_base (10)..(10): 5-methyl cytosine
tgaggaatacggaa

SEQ ID NO: 1103 - DNA, 14 bp, Artificial Sequence
  oligonucleotide - internucleotide bonds are phosphorothioate bonds (PS)
  modified_base (1)..(4): LNA nucleoside
  modified_base (11)..(14): LNA nucleoside
  modified_base (10)..(10): 5-methyl cytosine
tgaggaatacggaa

SEQ ID NO: 1104 - DNA, 14 bp, Artificial Sequence
  oligonucleotide - internucleotide bonds are phosphorothioate bonds (PS)
  modified_base (1)..(3): LNA nucleoside
  modified_base (11)..(14): LNA nucleoside
  modified_base (10)..(10): 5-methyl cytosine
tgaggaatacggaa

SEQ ID NO: 1105 - DNA, 14 bp, Artificial Sequence
  oligonucleotide - internucleotide bonds are phosphorothioate bonds (PS)
  modified_base (1)..(4): LNA nucleoside
  modified_base (12)..(14): LNA nucleoside
ccaacacctgtgat

SEQ ID NO: 1106 - DNA, 14 bp, Artificial Sequence
  oligonucleotide - internucleotide bonds are phosphorothioate bonds (PS)
  modified_base (1)..(2): LNA nucleoside
  modified_base (13)..(14): LNA nucleoside
ccaacacctgtgat

SEQ ID NO: 1107 - DNA, 14 bp, Artificial Sequence
  oligonucleotide - internucleotide bonds are phosphorothioate bonds (PS)
  modified_base (1)..(4): LNA nucleoside
  modified_base (11)..(14): LNA nucleoside
ccaacacctgtgat

SEQ ID NO: 1108 - DNA, 15 bp, Artificial Sequence
  oligonucleotide - internucleotide bonds are phosphorothioate bonds (PS)
  modified_base (1)..(2): LNA nucleoside
  modified_base (14)..(15): LNA nucleoside
accaacacctgtgat

SEQ ID NO: 1109 - DNA, 15 bp, Artificial Sequence
  oligonucleotide - internucleotide bonds are phosphorothioate bonds (PS)
  modified_base (1)..(4): LNA nucleoside
  modified_base (14)..(15): LNA nucleoside
accaacacctgtgat

SEQ ID NO: 1110 - DNA, 15 bp, Artificial Sequence
  oligonucleotide - internucleotide bonds are phosphorothioate bonds (PS)
  modified_base (1)..(4): LNA nucleoside
  modified_base (12)..(15): LNA nucleoside
accaacacctgtgat

SEQ ID NO: 1111 - DNA, 16 bp, Artificial Sequence
  oligonucleotide - internucleotide bonds are phosphorothioate bonds (PS)
  modified_base (1)..(3): LNA nucleoside
  modified_base (14)..(16): LNA nucleoside
taccaacacctgtgat

SEQ ID NO: 1112 - DNA, 16 bp, Artificial Sequence
  oligonucleotide - internucleotide bonds are phosphorothioate bonds (PS)
  modified_base (1)..(2): LNA nucleoside
  modified_base (15)..(16): LNA nucleoside
taccaacacctgtgat

SEQ ID NO: 1113 - DNA, 16 bp, Artificial Sequence
  oligonucleotide - internucleotide bonds are phosphorothioate bonds (PS)
  modified_base (1)..(4): LNA nucleoside
  modified_base (14)..(16): LNA nucleoside
taccaacacctgtgat

SEQ ID NO: 1114 - DNA, 14 bp, Artificial Sequence
  oligonucleotide - internucleotide bonds are phosphorothioate bonds (PS)
  modified_base (1)..(4): LNA nucleoside
  modified_base (11)..(14): LNA nucleoside
taccaacacctgtg

SEQ ID NO: 1115 - DNA, 14 bp, Artificial Sequence
  oligonucleotide - internucleotide bonds are phosphorothioate bonds (PS)
  modified_base (1)..(4): LNA nucleoside
  modified_base (12)..(14): LNA nucleoside
taccaacacctgtg

SEQ ID NO: 1116 - DNA, 14 bp, Artificial Sequence
  oligonucleotide - internucleotide bonds are phosphorothioate bonds (PS)
  modified_base (1)..(2): LNA nucleoside
  modified_base (12)..(14): LNA nucleoside
taccaacacctgtg

SEQ ID NO: 1117 - DNA, 15 bp, Artificial Sequence
  oligonucleotide - internucleotide bonds are phosphorothioate bonds (PS)
  modified_base (1)..(2): LNA nucleoside
  modified_base (12)..(15): LNA nucleoside
taccaacacctgtga

SEQ ID NO: 1118 - DNA, 15 bp, Artificial Sequence
  oligonucleotide - internucleotide bonds are phosphorothioate bonds (PS)
  modified_base (1)..(2): LNA nucleoside
  modified_base (14)..(15): LNA nucleoside
taccaacacctgtga

SEQ ID NO: 1119 - DNA, 15 bp, Artificial Sequence
  oligonucleotide - internucleotide bonds are phosphorothioate bonds (PS)
  modified_base (1)..(4): LNA nucleoside
  modified_base (12)..(15): LNA nucleoside
taccaacacctgtga

SEQ ID NO: 1120 - DNA, 14 bp, Artificial Sequence
  oligonucleotide - internucleotide bonds are phosphorothioate bonds (PS)
  modified_base (1)..(3): LNA nucleoside
  modified_base (13)..(14): LNA nucleoside
actctagggctcta

SEQ ID NO: 1121 - DNA, 14 bp, Artificial Sequence
  oligonucleotide - internucleotide bonds are phosphorothioate bonds (PS)
  modified_base (1)..(4): LNA nucleoside
  modified_base (11)..(14): LNA nucleoside
actctagggctcta

SEQ ID NO: 1122 - DNA, 14 bp, Artificial Sequence
  oligonucleotide - internucleotide bonds are phosphorothioate bonds (PS)
  modified_base (1)..(3): LNA nucleoside
  modified_base (11)..(14): LNA nucleoside
actctagggctcta

SEQ ID NO: 1123 - DNA, 15 bp, Artificial Sequence
  oligonucleotide - internucleotide bonds are phosphorothioate bonds (PS)
  modified_base (1)..(3): LNA nucleoside
  modified_base (12)..(15): LNA nucleoside
gacacaacatctttt

SEQ ID NO: 1124 - DNA, 15 bp, Artificial Sequence
  oligonucleotide - internucleotide bonds are phosphorothioate bonds (PS)
  modified_base (1)..(4): LNA nucleoside
  modified_base (13)..(15): LNA nucleoside
gacacaacatctttt

SEQ ID NO: 1125 - DNA, 15 bp, Artificial Sequence
  oligonucleotide - internucleotide bonds are phosphorothioate bonds (PS)
  modified_base (1)..(4): LNA nucleoside
  modified_base (12)..(15): LNA nucleoside
gacacaacatctttt

SEQ ID NO: 1126 - DNA, 14 bp, Artificial Sequence
  oligonucleotide - internucleotide bonds are phosphorothioate bonds (PS)
  modified_base (1)..(4): LNA nucleoside
  modified_base (11)..(14): LNA nucleoside
gacacaacatcttt

SEQ ID NO: 1127 - DNA, 14 bp, Artificial Sequence
  oligonucleotide - internucleotide bonds are phosphorothioate bonds (PS)
  modified_base (1)..(4): LNA nucleoside
  modified_base (12)..(14): LNA nucleoside
gacacaacatcttt

SEQ ID NO: 1128 - DNA, 14 bp, Artificial Sequence
  oligonucleotide - internucleotide bonds are phosphorothioate bonds (PS)
  modified_base (1)..(3): LNA nucleoside
  modified_base (11)..(14): LNA nucleoside
gacacaacatcttt

SEQ ID NO: 1129 - DNA, 14 bp, Artificial Sequence
  oligonucleotide - internucleotide bonds are phosphorothioate bonds (PS)
  modified_base (1)..(3): LNA nucleoside
  modified_base (11)..(14): LNA nucleoside
ttagaagcaggaca

SEQ ID NO: 1130 - DNA, 14 bp, Artificial Sequence
  oligonucleotide - internucleotide bonds are phosphorothioate bonds (PS)
  modified_base (1)..(4): LNA nucleoside
  modified_base (11)..(14): LNA nucleoside
ttagaagcaggaca

SEQ ID NO: 1131 - DNA, 14 bp, Artificial Sequence
  oligonucleotide - internucleotide bonds are phosphorothioate bonds (PS)
  modified_base (1)..(4): LNA nucleoside
  modified_base (12)..(14): LNA nucleoside
ttagaagcaggaca

SEQ ID NO: 1132 - DNA, 15 bp, Artificial Sequence
  oligonucleotide - internucleotide bonds are phosphorothioate bonds (PS)
  modified_base (1)..(3): LNA nucleoside
  modified_base (12)..(15): LNA nucleoside
tttagaagcaggaca

SEQ ID NO: 1133 - DNA, 15 bp, Artificial Sequence
  oligonucleotide - internucleotide bonds are phosphorothioate bonds (PS)
  modified_base (1)..(4): LNA nucleoside
  modified_base (12)..(15): LNA nucleoside
tttagaagcaggaca

SEQ ID NO: 1134 - DNA, 15 bp, Artificial Sequence
  oligonucleotide - internucleotide bonds are phosphorothioate bonds (PS)
  modified_base (1)..(4): LNA nucleoside
  modified_base (13)..(15): LNA nucleoside
tttagaagcaggaca

SEQ ID NO: 1135 - DNA, 15 bp, Artificial Sequence
  oligonucleotide - internucleotide bonds are phosphorothioate bonds (PS)
  modified_base (1)..(2): LNA nucleoside
  modified_base (13)..(15): LNA nucleoside
cagccttgtggctgg

SEQ ID NO: 1136 - DNA, 15 bp, Artificial Sequence
  oligonucleotide - internucleotide bonds are phosphorothioate bonds (PS)
  modified_base (1)..(3): LNA nucleoside
  modified_base (14)..(15): LNA nucleoside
cagccttgtggctgg

SEQ ID NO: 1137 - DNA, 15 bp, Artificial Sequence
  oligonucleotide - internucleotide bonds are phosphorothioate bonds (PS)
  modified_base (1)..(2): LNA nucleoside
  modified_base (14)..(15): LNA nucleoside
cagccttgtggctgg

SEQ ID NO: 1138 - DNA, 15 bp, Artificial Sequence
  oligonucleotide - internucleotide bonds are phosphorothioate bonds (PS)
  modified_base (1)..(3): LNA nucleoside
  modified_base (14)..(15): LNA nucleoside
ccctgcctgctcttg

SEQ ID NO: 1139 - DNA, 15 bp, Artificial Sequence
  oligonucleotide - internucleotide bonds are phosphorothioate bonds (PS)
  modified_base (1)..(2): LNA nucleoside
  modified_base (13)..(15): LNA nucleoside
ccctgcctgctcttg

SEQ ID NO: 1140 - DNA, 15 bp, Artificial Sequence
  oligonucleotide - internucleotide bonds are phosphorothioate bonds (PS)
  modified_base (1)..(2): LNA nucleoside
  modified_base (14)..(15): LNA nucleoside
ccctgcctgctcttg

SEQ ID NO: 1141 - DNA, 15 bp, Artificial Sequence
  oligonucleotide - internucleotide bonds are phosphorothioate bonds (PS)
  modified_base (1)..(2): LNA nucleoside
  modified_base (13)..(15): LNA nucleoside
cctgcctgctcttgc

SEQ ID NO: 1142 - DNA, 15 bp, Artificial Sequence
  oligonucleotide - internucleotide bonds are phosphorothioate bonds (PS)
  modified_base (1)..(3): LNA nucleoside
  modified_base (14)..(15): LNA nucleoside
cctgcctgctcttgc

SEQ ID NO: 1143 - DNA, 15 bp, Artificial Sequence
  oligonucleotide - internucleotide bonds are phosphorothioate bonds (PS)
  modified_base (1)..(2): LNA nucleoside
  modified_base (14)..(15): LNA nucleoside
cctgcctgctcttgc

SEQ ID NO: 1144 - DNA, 16 bp, Artificial Sequence
  oligonucleotide - internucleotide bonds are phosphorothioate bonds (PS)
  modified_base (1)..(2): LNA nucleoside
  modified_base (15)..(16): LNA nucleoside
ccctgcctgctcttgc

SEQ ID NO: 1145 - DNA, 16 bp, Artificial Sequence
  oligonucleotide - internucleotide bonds are phosphorothioate bonds (PS)
  modified_base (1)..(3): LNA nucleoside
  modified_base (15)..(16): LNA nucleoside
ccctgcctgctcttgc

SEQ ID NO: 1146 - DNA, 16 bp, Artificial Sequence
  oligonucleotide - internucleotide bonds are phosphorothioate bonds (PS)
  modified_base (1)..(2): LNA nucleoside
  modified_base (14)..(16): LNA nucleoside
ccctgcctgctcttgc

SEQ ID NO: 1147 - DNA, 15 bp, Artificial Sequence
  oligonucleotide - internucleotide bonds are phosphorothioate bonds (PS)
  modified_base (1)..(2): LNA nucleoside
  modified_base (13)..(15): LNA nucleoside
agttccctcacctgc

SEQ ID NO: 1148 - DNA, 15 bp, Artificial Sequence
  oligonucleotide - internucleotide bonds are phosphorothioate bonds (PS)
  modified_base (1)..(2): LNA nucleoside
  modified_base (14)..(15): LNA nucleoside
agttccctcacctgc

SEQ ID NO: 1149 - DNA, 15 bp, Artificial Sequence
  oligonucleotide - internucleotide bonds are phosphorothioate bonds (PS)
  modified_base (1)..(3): LNA nucleoside
  modified_base (14)..(15): LNA nucleoside
agttccctcacctgc

SEQ ID NO: 1150 - DNA, 14 bp, Artificial Sequence
  oligonucleotide - internucleotide bonds are phosphorothioate bonds (PS)
  modified_base (1)..(4): LNA nucleoside
  modified_base (13)..(14): LNA nucleoside
  modified_base (5)..(5): 5-methyl cytosine
cccacgctgatgtt

SEQ ID NO: 1151 - DNA, 14 bp, Artificial Sequence
  oligonucleotide - internucleotide bonds are phosphorothioate bonds (PS)
  modified_base (1)..(2): LNA nucleoside
  modified_base (12)..(14): LNA nucleoside
  modified_base (5)..(5): 5-methyl cytosine
cccacgctgatgtt

SEQ ID NO: 1152 - DNA, 14 bp, Artificial Sequence
  oligonucleotide - internucleotide bonds are phosphorothioate bonds (PS)
  modified_base (1)..(2): LNA nucleoside
  modified_base (13)..(14): LNA nucleoside
  modified_base (5)..(5): 5-methyl cytosine
cccacgctgatgtt

SEQ ID NO: 1153 - DNA, 15 bp, Artificial Sequence
  oligonucleotide - internucleotide bonds are phosphorothioate bonds (PS)
  modified_base (1)..(4): LNA nucleoside
  modified_base (12)..(15): LNA nucleoside
taagccaatgaacaa

SEQ ID NO: 1154 - DNA, 15 bp, Artificial Sequence
  oligonucleotide - internucleotide bonds are phosphorothioate bonds (PS)
  modified_base (1)..(4): LNA nucleoside
  modified_base (13)..(15): LNA nucleoside
taagccaatgaacaa

SEQ ID NO: 1155 - DNA, 15 bp, Artificial Sequence
  oligonucleotide - internucleotide bonds are phosphorothioate bonds (PS)
  modified_base (1)..(3): LNA nucleoside
  modified_base (12)..(15): LNA nucleoside
taagccaatgaacaa

SEQ ID NO: 1156 - DNA, 15 bp, Artificial Sequence
  oligonucleotide - internucleotide bonds are phosphorothioate bonds (PS)
  modified_base (1)..(3): LNA nucleoside
  modified_base (14)..(15): LNA nucleoside
cccacccaggaagga

SEQ ID NO: 1157 - DNA, 15 bp, Artificial Sequence
  oligonucleotide - internucleotide bonds are phosphorothioate bonds (PS)
  modified_base (1)..(2): LNA nucleoside
  modified_base (13)..(15): LNA nucleoside
cccacccaggaagga

SEQ ID NO: 1158 - DNA, 15 bp, Artificial Sequence
  oligonucleotide - internucleotide bonds are phosphorothioate bonds (PS)
  modified_base (1)..(2): LNA nucleoside
  modified_base (14)..(15): LNA nucleoside
cccacccaggaagga

SEQ ID NO: 1159 - DNA, 14 bp, Artificial Sequence
  oligonucleotide - internucleotide bonds are phosphorothioate bonds (PS)
  modified_base (1)..(3): LNA nucleoside
  modified_base (12)..(14): LNA nucleoside
gcagaacactggtg

SEQ ID NO: 1160 - DNA, 14 bp, Artificial Sequence
  oligonucleotide - internucleotide bonds are phosphorothioate bonds (PS)
  modified_base (1)..(2): LNA nucleoside
  modified_base (12)..(14): LNA nucleoside
gcagaacactggtg

SEQ ID NO: 1161 - DNA, 14 bp, Artificial Sequence
  oligonucleotide - internucleotide bonds are phosphorothioate bonds (PS)
  modified_base (1)..(4): LNA nucleoside
  modified_base (11)..(14): LNA nucleoside
gcagaacactggtg

SEQ ID NO: 1162 - DNA, 14 bp, Artificial Sequence
  oligonucleotide - internucleotide bonds are phosphorothioate bonds (PS)
  modified_base (1)..(2): LNA nucleoside
  modified_base (11)..(14): LNA nucleoside
ctcaacccttttcc

SEQ ID NO: 1163 - DNA, 14 bp, Artificial Sequence
  oligonucleotide - internucleotide bonds are phosphorothioate bonds (PS)
  modified_base (1)..(2): LNA nucleoside
  modified_base (13)..(14): LNA nucleoside
ctcaacccttttcc

SEQ ID NO: 1164 - DNA, 14 bp, Artificial Sequence
  oligonucleotide - internucleotide bonds are phosphorothioate bonds (PS)
  modified_base (1)..(4): LNA nucleoside
  modified_base (11)..(14): LNA nucleoside
ctcaacccttttcc

SEQ ID NO: 1165 - DNA, 14 bp, Artificial Sequence
  oligonucleotide - internucleotide bonds are phosphorothioate bonds (PS)
  modified_base (1)..(3): LNA nucleoside
  modified_base (13)..(14): LNA nucleoside
cccacaaagggcct

SEQ ID NO: 1166 - DNA, 14 bp, Artificial Sequence
  oligonucleotide - internucleotide bonds are phosphorothioate bonds (PS)
  modified_base (1)..(2): LNA nucleoside
  modified_base (13)..(14): LNA nucleoside
cccacaaagggcct

SEQ ID NO: 1167 - DNA, 14 bp, Artificial Sequence
  oligonucleotide - internucleotide bonds are phosphorothioate bonds (PS)
  modified_base (1)..(2): LNA nucleoside
  modified_base (12)..(14): LNA nucleoside
cccacaaagggcct

SEQ ID NO: 1168 - DNA, 14 bp, Artificial Sequence
  oligonucleotide - internucleotide bonds are phosphorothioate bonds (PS)
  modified_base (1)..(2): LNA nucleoside
  modified_base (13)..(14): LNA nucleoside
ccacaaagggcctg

SEQ ID NO: 1169 - DNA, 14 bp, Artificial Sequence
  oligonucleotide - internucleotide bonds are phosphorothioate bonds (PS)
  modified_base (1)..(4): LNA nucleoside
  modified_base (12)..(14): LNA nucleoside
ccacaaagggcctg

SEQ ID NO: 1170 - DNA, 14 bp, Artificial Sequence
  oligonucleotide - internucleotide bonds are phosphorothioate bonds (PS)
  modified_base (1)..(2): LNA nucleoside
  modified_base (12)..(14): LNA nucleoside
ccacaaagggcctg

SEQ ID NO: 1171 - DNA, 15 bp, Artificial Sequence
  oligonucleotide - internucleotide bonds are phosphorothioate bonds (PS)
  modified_base (1)..(3): LNA nucleoside
  modified_base (14)..(15): LNA nucleoside
cccacaaagggcctg

SEQ ID NO: 1172 - DNA, 15 bp, Artificial Sequence
  oligonucleotide - internucleotide bonds are phosphorothioate bonds (PS)
  modified_base (1)..(2): LNA nucleoside
  modified_base (14)..(15): LNA nucleoside
cccacaaagggcctg

SEQ ID NO: 1173 - DNA, 15 bp, Artificial Sequence
  oligonucleotide - internucleotide bonds are phosphorothioate bonds (PS)
  modified_base (1)..(2): LNA nucleoside
  modified_base (13)..(15): LNA nucleoside
cccacaaagggcctg

SEQ ID NO: 1174 - DNA, 15 bp, Artificial Sequence
  oligonucleotide - internucleotide bonds are phosphorothioate bonds (PS)
  modified_base (1)..(4): LNA nucleoside
  modified_base (13)..(15): LNA nucleoside
aaagatgcttcagag

SEQ ID NO: 1175 - DNA, 15 bp, Artificial Sequence
  oligonucleotide - internucleotide bonds are phosphorothioate bonds (PS)
  modified_base (1)..(4): LNA nucleoside
  modified_base (12)..(15): LNA nucleoside
aaagatgcttcagag

SEQ ID NO: 1176 - DNA, 15 bp, Artificial Sequence
  oligonucleotide - internucleotide bonds are phosphorothioate bonds (PS)
  modified_base (1)..(3): LNA nucleoside
  modified_base (12)..(15): LNA nucleoside
aaagatgcttcagag

SEQ ID NO: 1177 - DNA, 14 bp, Artificial Sequence
  oligonucleotide - internucleotide bonds are phosphorothioate bonds (PS)
  modified_base (1)..(4): LNA nucleoside
  modified_base (12)..(14): LNA nucleoside
  modified_base (5)..(5): 5-methyl cytosine
caagcgcttcacag

SEQ ID NO: 1178 - DNA, 14 bp, Artificial Sequence
  oligonucleotide - internucleotide bonds are phosphorothioate bonds (PS)
  modified_base (1)..(2): LNA nucleoside
  modified_base (12)..(14): LNA nucleoside
  modified_base (5)..(5): 5-methyl cytosine
caagcgcttcacag

SEQ ID NO: 1179 - DNA, 14 bp, Artificial Sequence
  oligonucleotide - internucleotide bonds are phosphorothioate bonds (PS)
  modified_base (1)..(4): LNA nucleoside
  modified_base (11)..(14): LNA nucleoside
  modified_base (5)..(5): 5-methyl cytosine
caagcgcttcacag

SEQ ID NO: 1180 - DNA, 15 bp, Artificial Sequence
  oligonucleotide - internucleotide bonds are phosphorothioate bonds (PS)
  modified_base (1)..(2): LNA nucleoside
  modified_base (14)..(15): LNA nucleoside
gggcaggctccctgt

SEQ ID NO: 1181 - DNA, 15 bp, Artificial Sequence
  oligonucleotide - internucleotide bonds are phosphorothioate bonds (PS)
  modified_base (1)..(2): LNA nucleoside
  modified_base (13)..(15): LNA nucleoside
gggcaggctccctgt

SEQ ID NO: 1182 - DNA, 15 bp, Artificial Sequence
  oligonucleotide - internucleotide bonds are phosphorothioate bonds (PS)
  modified_base (1)..(3): LNA nucleoside
  modified_base (14)..(15): LNA nucleoside
gggcaggctccctgt

SEQ ID NO: 1183 - DNA, 16 bp, Artificial Sequence
  oligonucleotide - internucleotide bonds are phosphorothioate bonds (PS)
  modified_base (1)..(2): LNA nucleoside
  modified_base (14)..(16): LNA nucleoside
caggccctgcccccag

SEQ ID NO: 1184 - DNA, 16 bp, Artificial Sequence
  oligonucleotide - internucleotide bonds are phosphorothioate bonds (PS)
  modified_base (1)..(2): LNA nucleoside
  modified_base (15)..(16): LNA nucleoside
caggccctgcccccag

SEQ ID NO: 1185 - DNA, 16 bp, Artificial Sequence
  oligonucleotide - internucleotide bonds are phosphorothioate bonds (PS)
  modified_base (1)..(3): LNA nucleoside
  modified_base (15)..(16): LNA nucleoside
caggccctgcccccag

SEQ ID NO: 1186 - DNA, 15 bp, Artificial Sequence
  oligonucleotide - internucleotide bonds are phosphorothioate bonds (PS)
  modified_base (1)..(2): LNA nucleoside
  modified_base (14)..(15): LNA nucleoside
ccacagagctggccc

SEQ ID NO: 1187 - DNA, 15 bp, Artificial Sequence
  oligonucleotide - internucleotide bonds are phosphorothioate bonds (PS)
  modified_base (1)..(3): LNA nucleoside
  modified_base (14)..(15): LNA nucleoside
ccacagagctggccc

SEQ ID NO: 1188 - DNA, 15 bp, Artificial Sequence
  oligonucleotide - internucleotide bonds are phosphorothioate bonds (PS)
  modified_base (1)..(2): LNA nucleoside
  modified_base (13)..(15): LNA nucleoside
ccacagagctggccc

SEQ ID NO: 1189 - DNA, 16 bp, Artificial Sequence
  oligonucleotide - internucleotide bonds are phosphorothioate bonds (PS)
  modified_base (1)..(2): LNA nucleoside
  modified_base (14)..(16): LNA nucleoside
cccacagagctggccc

SEQ ID NO: 1190 - DNA, 16 bp, Artificial Sequence
  oligonucleotide - internucleotide bonds are phosphorothioate bonds (PS)
  modified_base (1)..(2): LNA nucleoside
  modified_base (15)..(16): LNA nucleoside
cccacagagctggccc

SEQ ID NO: 1191 - DNA, 16 bp, Artificial Sequence
  oligonucleotide - internucleotide bonds are phosphorothioate bonds (PS)
  modified_base (1)..(3): LNA nucleoside
  modified_base (15)..(16): LNA nucleoside
cccacagagctggccc

SEQ ID NO: 1192 - DNA, 14 bp, Artificial Sequence
  oligonucleotide - internucleotide bonds are phosphorothioate bonds (PS)
  modified_base (1)..(4): LNA nucleoside
  modified_base (11)..(14): LNA nucleoside
actcaggacttgat

SEQ ID NO: 1193 - DNA, 14 bp, Artificial Sequence
  oligonucleotide - internucleotide bonds are phosphorothioate bonds (PS)
  modified_base (1)..(3): LNA nucleoside
  modified_base (11)..(14): LNA nucleoside
actcaggacttgat

SEQ ID NO: 1194 - DNA, 14 bp, Artificial Sequence
  oligonucleotide - internucleotide bonds are phosphorothioate bonds (PS)
  modified_base (1)..(4): LNA nucleoside
  modified_base (12)..(14): LNA nucleoside
actcaggacttgat

SEQ ID NO: 1195 - DNA, 15 bp, Artificial Sequence
  oligonucleotide - internucleotide bonds are phosphorothioate bonds (PS)
  modified_base (1)..(4): LNA nucleoside
  modified_base (12)..(15): LNA nucleoside
cactcaggacttgat

SEQ ID NO: 1196 - DNA, 15 bp, Artificial Sequence
  oligonucleotide - internucleotide bonds are phosphorothioate bonds (PS)
  modified_base (1)..(3): LNA nucleoside
  modified_base (12)..(15): LNA nucleoside
cactcaggacttgat

SEQ ID NO: 1197 - DNA, 15 bp, Artificial Sequence
  oligonucleotide - internucleotide bonds are phosphorothioate bonds (PS)
  modified_base (1)..(3): LNA nucleoside
  modified_base (14)..(15): LNA nucleoside
cactcaggacttgat

SEQ ID NO: 1198 - DNA, 15 bp, Artificial Sequence
  oligonucleotide - internucleotide bonds are phosphorothioate bonds (PS)
  modified_base (1)..(4): LNA nucleoside
  modified_base (14)..(15): LNA nucleoside
actcaggacttgatg

SEQ ID NO: 1199 - DNA, 15 bp, Artificial Sequence
  oligonucleotide - internucleotide bonds are phosphorothioate bonds (PS)
  modified_base (1)..(3): LNA nucleoside
  modified_base (12)..(15): LNA nucleoside
actcaggacttgatg

SEQ ID NO: 1200 - DNA, 15 bp, Artificial Sequence
  oligonucleotide - internucleotide bonds are phosphorothioate bonds (PS)
  modified_base (1)..(4): LNA nucleoside
  modified_base (12)..(15): LNA nucleoside
actcaggacttgatg

SEQ ID NO: 1201 - DNA, 16 bp, Artificial Sequence
  oligonucleotide - internucleotide bonds are phosphorothioate bonds (PS)
  modified_base (1)..(2): LNA nucleoside
  modified_base (15)..(16): LNA nucleoside
cactcaggacttgatg

SEQ ID NO: 1202 - DNA, 16 bp, Artificial Sequence
  oligonucleotide - internucleotide bonds are phosphorothioate bonds (PS)
  modified_base (1)..(4): LNA nucleoside
  modified_base (14)..(16): LNA nucleoside
cactcaggacttgatg

SEQ ID NO: 1203 - DNA, 16 bp, Artificial Sequence
  oligonucleotide - internucleotide bonds are phosphorothioate bonds (PS)
  modified_base (1)..(4): LNA nucleoside
  modified_base (13)..(16): LNA nucleoside
cactcaggacttgatg

SEQ ID NO: 1204 - DNA, 15 bp, Artificial Sequence
  oligonucleotide - internucleotide bonds are phosphorothioate bonds (PS)
  modified_base (1)..(4): LNA nucleoside
  modified_base (12)..(15): LNA nucleoside
ctcaggacttgatgg

SEQ ID NO: 1205 - DNA, 15 bp, Artificial Sequence
  oligonucleotide - internucleotide bonds are phosphorothioate bonds (PS)
  modified_base (1)..(3): LNA nucleoside
  modified_base (12)..(15): LNA nucleoside
ctcaggacttgatgg

SEQ ID NO: 1206 - DNA, 15 bp, Artificial Sequence
  oligonucleotide - internucleotide bonds are phosphorothioate bonds (PS)
  modified_base (1)..(3): LNA nucleoside
  modified_base (14)..(15): LNA nucleoside
ctcaggacttgatgg

SEQ ID NO: 1207 - DNA, 16 bp, Artificial Sequence
  oligonucleotide - internucleotide bonds are phosphorothioate bonds (PS)
  modified_base (1)..(3): LNA nucleoside
  modified_base (14)..(16): LNA nucleoside
actcaggacttgatgg

SEQ ID NO: 1208 - DNA, 16 bp, Artificial Sequence
  oligonucleotide - internucleotide bonds are phosphorothioate bonds (PS)
  modified_base (1)..(2): LNA nucleoside
  modified_base (15)..(16): LNA nucleoside
actcaggacttgatgg

SEQ ID NO: 1209 - DNA, 16 bp, Artificial Sequence
  oligonucleotide - internucleotide bonds are phosphorothioate bonds (PS)
  modified_base (1)..(4): LNA nucleoside
  modified_base (13)..(16): LNA nucleoside
actcaggacttgatgg

SEQ ID NO: 1210 - DNA, 17 bp, Artificial Sequence
  oligonucleotide - internucleotide bonds are phosphorothioate bonds (PS)
  modified_base (1)..(2): LNA nucleoside
  modified_base (16)..(17): LNA nucleoside
cactcaggacttgatgg

SEQ ID NO: 1211 - DNA, 17 bp, Artificial Sequence
  oligonucleotide - internucleotide bonds are phosphorothioate bonds (PS)
  modified_base (1)..(4): LNA nucleoside
  modified_base (15)..(17): LNA nucleoside
cactcaggacttgatgg

SEQ ID NO: 1212 - DNA, 17 bp, Artificial Sequence
  oligonucleotide - internucleotide bonds are phosphorothioate bonds (PS)
  modified_base (1)..(3): LNA nucleoside
  modified_base (16)..(17): LNA nucleoside
cactcaggacttgatgg

SEQ ID NO: 1213 - DNA, 14 bp, Artificial Sequence
  oligonucleotide - internucleotide bonds are phosphorothioate bonds (PS)
  modified_base (1)..(4): LNA nucleoside
  modified_base (12)..(14): LNA nucleoside
cactcaggacttga

SEQ ID NO: 1214 - DNA, 14 bp, Artificial Sequence
  oligonucleotide - internucleotide bonds are phosphorothioate bonds (PS)
  modified_base (1)..(4): LNA nucleoside
  modified_base (13)..(14): LNA nucleoside
cactcaggacttga

SEQ ID NO: 1215 - DNA, 14 bp, Artificial Sequence
  oligonucleotide - internucleotide bonds are phosphorothioate bonds (PS)
  modified_base (1)..(4): LNA nucleoside
  modified_base (11)..(14): LNA nucleoside
cactcaggacttga

SEQ ID NO: 1216 - DNA, 15 bp, Artificial Sequence
  oligonucleotide - internucleotide bonds are phosphorothioate bonds (PS)
  modified_base (1)..(4): LNA nucleoside
  modified_base (14)..(15): LNA nucleoside
gcattttcagaagag

SEQ ID NO: 1217 - DNA, 15 bp, Artificial Sequence
  oligonucleotide - internucleotide bonds are phosphorothioate bonds (PS)
  modified_base (1)..(3): LNA nucleoside
  modified_base (12)..(15): LNA nucleoside
gcattttcagaagag

SEQ ID NO: 1218 - DNA, 15 bp, Artificial Sequence
  oligonucleotide - internucleotide bonds are phosphorothioate bonds (PS)
  modified_base (1)..(4): LNA nucleoside
  modified_base (12)..(15): LNA nucleoside
gcattttcagaagag

SEQ ID NO: 1219 - DNA, 16 bp, Artificial Sequence
  oligonucleotide - internucleotide bonds are phosphorothioate bonds (PS)
  modified_base (1)..(3): LNA nucleoside
  modified_base (13)..(16): LNA nucleoside
tgcattttcagaagag

SEQ ID NO: 1220 - DNA, 16 bp, Artificial Sequence
  oligonucleotide - internucleotide bonds are phosphorothioate bonds (PS)
  modified_base (1)..(3): LNA nucleoside
  modified_base (15)..(16): LNA nucleoside
tgcattttcagaagag

SEQ ID NO: 1221 - DNA, 16 bp, Artificial Sequence
  oligonucleotide - internucleotide bonds are phosphorothioate bonds (PS)
  modified_base (1)..(4): LNA nucleoside
  modified_base (13)..(16): LNA nucleoside
tgcattttcagaagag

SEQ ID NO: 1222 - DNA, 17 bp, Artificial Sequence
  oligonucleotide - internucleotide bonds are phosphorothioate bonds (PS)
  modified_base (1)..(2): LNA nucleoside
  modified_base (15)..(17): LNA nucleoside
ttgcattttcagaagag

SEQ ID NO: 1223 - DNA, 17 bp, Artificial Sequence
  oligonucleotide - internucleotide bonds are phosphorothioate bonds (PS)
  modified_base (1)..(3): LNA nucleoside
  modified_base (14)..(17): LNA nucleoside
ttgcattttcagaagag

SEQ ID NO: 1224 - DNA, 17 bp, Artificial Sequence
  oligonucleotide - internucleotide bonds are phosphorothioate bonds (PS)
  modified_base (1)..(4): LNA nucleoside
  modified_base (14)..(17): LNA nucleoside
ttgcattttcagaagag

SEQ ID NO: 1225 - DNA, 18 bp, Artificial Sequence
  oligonucleotide - internucleotide bonds are phosphorothioate bonds (PS)
  modified_base (1)..(4): LNA nucleoside
  modified_base (15)..(18): LNA nucleoside
tttgcattttcagaagag

SEQ ID NO: 1226 - DNA, 18 bp, Artificial Sequence
  oligonucleotide - internucleotide bonds are phosphorothioate bonds (PS)
  modified_base (1)..(4): LNA nucleoside
  modified_base (16)..(18): LNA nucleoside
tttgcattttcagaagag

SEQ ID NO: 1227 - DNA, 18 bp, Artificial Sequence
  oligonucleotide - internucleotide bonds are phosphorothioate bonds (PS)
  modified_base (1)..(3): LNA nucleoside
  modified_base (17)..(18): LNA nucleoside
tttgcattttcagaagag

SEQ ID NO: 1228 - DNA, 15 bp, Artificial Sequence
  oligonucleotide - internucleotide bonds are phosphorothioate bonds (PS)
  modified_base (1)..(4): LNA nucleoside
  modified_base (12)..(15): LNA nucleoside
ttgcattttcagaag

SEQ ID NO: 1229 - DNA, 15 bp, Artificial Sequence
  oligonucleotide - internucleotide bonds are phosphorothioate bonds (PS)
  modified_base (1)..(3): LNA nucleoside
  modified_base (12)..(15): LNA nucleoside
ttgcattttcagaag

SEQ ID NO: 1230 - DNA, 15 bp, Artificial Sequence
  oligonucleotide - internucleotide bonds are phosphorothioate bonds (PS)
  modified_base (1)..(4): LNA nucleoside
  modified_base (13)..(15): LNA nucleoside
ttgcattttcagaag

SEQ ID NO: 1231 - DNA, 16 bp, Artificial Sequence
  oligonucleotide - internucleotide bonds are phosphorothioate bonds (PS)
  modified_base (1)..(3): LNA nucleoside
  modified_base (13)..(16): LNA nucleoside
tttgcattttcagaag

SEQ ID NO: 1232 - DNA, 16 bp, Artificial Sequence
  oligonucleotide - internucleotide bonds are phosphorothioate bonds (PS)
  modified_base (1)..(4): LNA nucleoside
  modified_base (14)..(16): LNA nucleoside
tttgcattttcagaag

SEQ ID NO: 1233 - DNA, 16 bp, Artificial Sequence
  oligonucleotide - internucleotide bonds are phosphorothioate bonds (PS)
  modified_base (1)..(4): LNA nucleoside
  modified_base (13)..(16): LNA nucleoside
tttgcattttcagaag

SEQ ID NO: 1234 - DNA, 14 bp, Artificial Sequence
  oligonucleotide - internucleotide bonds are phosphorothioate bonds (PS)
  modified_base (1)..(4): LNA nucleoside
  modified_base (11)..(14): LNA nucleoside
acctgtctggaaac

SEQ ID NO: 1235 - DNA, 14 bp, Artificial Sequence
  oligonucleotide - internucleotide bonds are phosphorothioate bonds (PS)
  modified_base (1)..(3): LNA nucleoside
  modified_base (11)..(14): LNA nucleoside
acctgtctggaaac

SEQ ID NO: 1236 - DNA, 14 bp, Artificial Sequence
  oligonucleotide - internucleotide bonds are phosphorothioate bonds (PS)
  modified_base (1)..(4): LNA nucleoside
  modified_base (12)..(14): LNA nucleoside
acctgtctggaaac

SEQ ID NO: 1237 - DNA, 16 bp, Artificial Sequence
  oligonucleotide - internucleotide bonds are phosphorothioate bonds (PS)
  modified_base (1)..(3): LNA nucleoside
  modified_base (14)..(16): LNA nucleoside
ttgcattttcagaaga

SEQ ID NO: 1238 - DNA, 16 bp, Artificial Sequence
  oligonucleotide - internucleotide bonds are phosphorothioate bonds (PS)
  modified_base (1)..(4): LNA nucleoside
  modified_base (14)..(16): LNA nucleoside
ttgcattttcagaaga

SEQ ID NO: 1239 - DNA, 16 bp, Artificial Sequence
  oligonucleotide - internucleotide bonds are phosphorothioate bonds (PS)
  modified_base (1)..(4): LNA nucleoside
  modified_base (13)..(16): LNA nucleoside
ttgcattttcagaaga

SEQ ID NO: 1240 - DNA, 17 bp, Artificial Sequence
  oligonucleotide - internucleotide bonds are phosphorothioate bonds (PS)
  modified_base (1)..(2): LNA nucleoside
  modified_base (14)..(17): LNA nucleoside
tttgcattttcagaaga

SEQ ID NO: 1241 - DNA, 17 bp, Artificial Sequence
  oligonucleotide - internucleotide bonds are phosphorothioate bonds (PS)
  modified_base (1)..(4): LNA nucleoside
  modified_base (14)..(17): LNA nucleoside
tttgcattttcagaaga

SEQ ID NO: 1242 - DNA, 17 bp, Artificial Sequence
  oligonucleotide - internucleotide bonds are phosphorothioate bonds (PS)
  modified_base (1)..(4): LNA nucleoside
  modified_base (15)..(17): LNA nucleoside
tttgcattttcagaaga

SEQ ID NO: 1243 - DNA, 15 bp, Artificial Sequence
  oligonucleotide - internucleotide bonds are phosphorothioate bonds (PS)
  modified_base (1)..(4): LNA nucleoside
  modified_base (13)..(15): LNA nucleoside
ggatggctatgagaa

SEQ ID NO: 1244 - DNA, 15 bp, Artificial Sequence
  oligonucleotide - internucleotide bonds are phosphorothioate bonds (PS)
  modified_base (1)..(2): LNA nucleoside
  modified_base (13)..(15): LNA nucleoside
ggatggctatgagaa

SEQ ID NO: 1245 - DNA, 15 bp, Artificial Sequence
  oligonucleotide - internucleotide bonds are phosphorothioate bonds (PS)
  modified_base (1)..(4): LNA nucleoside
  modified_base (12)..(15): LNA nucleoside
ggatggctatgagaa

SEQ ID NO: 1246 - DNA, 15 bp, Artificial Sequence
  oligonucleotide - internucleotide bonds are phosphorothioate bonds (PS)
  modified_base (1)..(2): LNA nucleoside
  modified_base (13)..(15): LNA nucleoside
ctgccacccaggagt

SEQ ID NO: 1247 - DNA, 15 bp, Artificial Sequence
  oligonucleotide - internucleotide bonds are phosphorothioate bonds (PS)
  modified_base (1)..(3): LNA nucleoside
  modified_base (14)..(15): LNA nucleoside
ctgccacccaggagt

SEQ ID NO: 1248 - DNA, 15 bp, Artificial Sequence
  oligonucleotide - internucleotide bonds are phosphorothioate bonds (PS)
  modified_base (1)..(2): LNA nucleoside
  modified_base (14)..(15): LNA nucleoside
ctgccacccaggagt

SEQ ID NO: 1249 - DNA, 14 bp, Artificial Sequence
  oligonucleotide - internucleotide bonds are phosphorothioate bonds (PS)
  modified_base (1)..(2): LNA nucleoside
  modified_base (13)..(14): LNA nucleoside
tgcctcattggcct

SEQ ID NO: 1250 - DNA, 14 bp, Artificial Sequence
  oligonucleotide - internucleotide bonds are phosphorothioate bonds (PS)
  modified_base (1)..(3): LNA nucleoside
  modified_base (13)..(14): LNA nucleoside
tgcctcattggcct

SEQ ID NO: 1251 - DNA, 14 bp, Artificial Sequence
  oligonucleotide - internucleotide bonds are phosphorothioate bonds (PS)
  modified_base (1)..(2): LNA nucleoside
  modified_base (12)..(14): LNA nucleoside
tgcctcattggcct

SEQ ID NO: 1252 - DNA, 15 bp, Artificial Sequence
  oligonucleotide - internucleotide bonds are phosphorothioate bonds (PS)
  modified_base (1)..(2): LNA nucleoside
  modified_base (13)..(15): LNA nucleoside
ctgcctcattggcct

SEQ ID NO: 1253 - DNA, 15 bp, Artificial Sequence
  oligonucleotide - internucleotide bonds are phosphorothioate bonds (PS)
  modified_base (1)..(2): LNA nucleoside
  modified_base (14)..(15): LNA nucleoside
ctgcctcattggcct

SEQ ID NO: 1254 - DNA, 15 bp, Artificial Sequence
  oligonucleotide - internucleotide bonds are phosphorothioate bonds (PS)
  modified_base (1)..(3): LNA nucleoside
  modified_base (14)..(15): LNA nucleoside
ctgcctcattggcct

SEQ ID NO: 1255 - DNA, 16 bp, Artificial Sequence
  oligonucleotide - internucleotide bonds are phosphorothioate bonds (PS)
  modified_base (1)..(2): LNA nucleoside
  modified_base (14)..(16): LNA nucleoside
actgcctcattggcct

SEQ ID NO: 1256 - DNA, 16 bp, Artificial Sequence
  oligonucleotide - internucleotide bonds are phosphorothioate bonds (PS)
  modified_base (1)..(3): LNA nucleoside
  modified_base (15)..(16): LNA nucleoside
actgcctcattggcct

SEQ ID NO: 1257 - DNA, 16 bp, Artificial Sequence
  oligonucleotide - internucleotide bonds are phosphorothioate bonds (PS)
  modified_base (1)..(2): LNA nucleoside
  modified_base (15)..(16): LNA nucleoside
actgcctcattggcct

SEQ ID NO: 1258 - DNA, 14 bp, Artificial Sequence
  oligonucleotide - internucleotide bonds are phosphorothioate bonds (PS)
  modified_base (1)..(4): LNA nucleoside
  modified_base (12)..(14): LNA nucleoside
cttttagatgttgg

SEQ ID NO: 1259 - DNA, 14 bp, Artificial Sequence
  oligonucleotide - internucleotide bonds are phosphorothioate bonds (PS)
  modified_base (1)..(4): LNA nucleoside
  modified_base (11)..(14): LNA nucleoside
cttttagatgttgg

SEQ ID NO: 1260 - DNA, 14 bp, Artificial Sequence
  oligonucleotide - internucleotide bonds are phosphorothioate bonds (PS)
  modified_base (1)..(3): LNA nucleoside
  modified_base (11)..(14): LNA nucleoside
cttttagatgttgg

SEQ ID NO: 1261 - DNA, 14 bp, Artificial Sequence
  oligonucleotide - internucleotide bonds are phosphorothioate bonds (PS)
  modified_base (1)..(4): LNA nucleoside
  modified_base (12)..(14): LNA nucleoside
actgcctcattggc

SEQ ID NO: 1262 - DNA, 14 bp, Artificial Sequence
  oligonucleotide - internucleotide bonds are phosphorothioate bonds (PS)
  modified_base (1)..(2): LNA nucleoside
  modified_base (12)..(14): LNA nucleoside
actgcctcattggc

SEQ ID NO: 1263 - DNA, 14 bp, Artificial Sequence
  oligonucleotide - internucleotide bonds are phosphorothioate bonds (PS)
  modified_base (1)..(2): LNA nucleoside
  modified_base (13)..(14): LNA nucleoside
actgcctcattggc

SEQ ID NO: 1264 - DNA, 15 bp, Artificial Sequence
  oligonucleotide - internucleotide bonds are phosphorothioate bonds (PS)
  modified_base (1)..(3): LNA nucleoside
  modified_base (14)..(15): LNA nucleoside
actgcctcattggcc

SEQ ID NO: 1265 - DNA, 15 bp, Artificial Sequence
  oligonucleotide - internucleotide bonds are phosphorothioate bonds (PS)
  modified_base (1)..(2): LNA nucleoside
  modified_base (13)..(15): LNA nucleoside
actgcctcattggcc

SEQ ID NO: 1266 - DNA, 15 bp, Artificial Sequence
  oligonucleotide - internucleotide bonds are phosphorothioate bonds (PS)
  modified_base (1)..(2): LNA nucleoside
  modified_base (14)..(15): LNA nucleoside
actgcctcattggcc

SEQ ID NO: 1267 - DNA, 16 bp, Artificial Sequence
  oligonucleotide - internucleotide bonds are phosphorothioate bonds (PS)
  modified_base (1)..(2): LNA nucleoside
  modified_base (15)..(16): LNA nucleoside
tggcttctttttgttt

SEQ ID NO: 1268 - DNA, 16 bp, Artificial Sequence
  oligonucleotide - internucleotide bonds are phosphorothioate bonds (PS)
  modified_base (1)..(3): LNA nucleoside
  modified_base (14)..(16): LNA nucleoside
tggcttctttttgttt

SEQ ID NO: 1269 - DNA, 16 bp, Artificial Sequence
  oligonucleotide - internucleotide bonds are phosphorothioate bonds (PS)
  modified_base (1)..(4): LNA nucleoside
  modified_base (13)..(16): LNA nucleoside
tggcttctttttgttt

SEQ ID NO: 1270 - DNA, 15 bp, Artificial Sequence
  oligonucleotide - internucleotide bonds are phosphorothioate bonds (PS)
  modified_base (1)..(2): LNA nucleoside
  modified_base (12)..(15): LNA nucleoside
ctgtctggaaacctt

SEQ ID NO: 1271 - DNA, 15 bp, Artificial Sequence
  oligonucleotide - internucleotide bonds are phosphorothioate bonds (PS)
  modified_base (1)..(3): LNA nucleoside
  modified_base (14)..(15): LNA nucleoside
ctgtctggaaacctt

SEQ ID NO: 1272 - DNA, 15 bp, Artificial Sequence
  oligonucleotide - internucleotide bonds are phosphorothioate bonds (PS)
  modified_base (1)..(4): LNA nucleoside
  modified_base (12)..(15): LNA nucleoside
ctgtctggaaacctt

SEQ ID NO: 1273 - DNA, 16 bp, Artificial Sequence
  oligonucleotide - internucleotide bonds are phosphorothioate bonds (PS)
  modified_base (1)..(3): LNA nucleoside
  modified_base (14)..(16): LNA nucleoside
cctgtctggaaacctt

SEQ ID NO: 1274 - DNA, 16 bp, Artificial Sequence
  oligonucleotide - internucleotide bonds are phosphorothioate bonds (PS)
  modified_base (1)..(2): LNA nucleoside
  modified_base (14)..(16): LNA nucleoside
cctgtctggaaacctt

SEQ ID NO: 1275 - DNA, 16 bp, Artificial Sequence
  oligonucleotide - internucleotide bonds are phosphorothioate bonds (PS)
  modified_base (1)..(2): LNA nucleoside
  modified_base (15)..(16): LNA nucleoside
cctgtctggaaacctt

SEQ ID NO: 1276 - DNA, 15 bp, Artificial Sequence
  oligonucleotide - internucleotide bonds are phosphorothioate bonds (PS)
  modified_base (1)..(4): LNA nucleoside
  modified_base (12)..(15): LNA nucleoside
tctgaggcagaatgt

SEQ ID NO: 1277 - DNA, 15 bp, Artificial Sequence
  oligonucleotide - internucleotide bonds are phosphorothioate bonds (PS)
  modified_base (1)..(4): LNA nucleoside
  modified_base (13)..(15): LNA nucleoside
tctgaggcagaatgt

SEQ ID NO: 1278 - DNA, 15 bp, Artificial Sequence
  oligonucleotide - internucleotide bonds are phosphorothioate bonds (PS)
  modified_base (1)..(3): LNA nucleoside
  modified_base (14)..(15): LNA nucleoside
tctgaggcagaatgt

SEQ ID NO: 1279 - DNA, 14 bp, Artificial Sequence
  oligonucleotide - internucleotide bonds are phosphorothioate bonds (PS)
  modified_base (1)..(3): LNA nucleoside
  modified_base (11)..(14): LNA nucleoside
tatggtgtatacgt

SEQ ID NO: 1280 - DNA, 14 bp, Artificial Sequence
  oligonucleotide - internucleotide bonds are phosphorothioate bonds (PS)
  modified_base (1)..(4): LNA nucleoside
  modified_base (11)..(14): LNA nucleoside
tatggtgtatacgt

SEQ ID NO: 1281 - DNA, 14 bp, Artificial Sequence
  oligonucleotide - internucleotide bonds are phosphorothioate bonds (PS)
  modified_base (1)..(4): LNA nucleoside
  modified_base (12)..(14): LNA nucleoside
tatggtgtatacgt

SEQ ID NO: 1282 - DNA, 15 bp, Artificial Sequence
  oligonucleotide - internucleotide bonds are phosphorothioate bonds (PS)
  modified_base (1)..(4): LNA nucleoside
  modified_base (13)..(15): LNA nucleoside
ctatggtgtatacgt

SEQ ID NO: 1283 - DNA, 15 bp, Artificial Sequence
  oligonucleotide - internucleotide bonds are phosphorothioate bonds (PS)
  modified_base (1)..(4): LNA nucleoside
  modified_base (12)..(15): LNA nucleoside
ctatggtgtatacgt

SEQ ID NO: 1284 - DNA, 15 bp, Artificial Sequence
  oligonucleotide - internucleotide bonds are phosphorothioate bonds (PS)
  modified_base (1)..(2): LNA nucleoside
  modified_base (13)..(15): LNA nucleoside
ctatggtgtatacgt

SEQ ID NO: 1285 - DNA, 16 bp, Artificial Sequence
  oligonucleotide - internucleotide bonds are phosphorothioate bonds (PS)
  modified_base (1)..(4): LNA nucleoside
  modified_base (13)..(16): LNA nucleoside
tctatggtgtatacgt

SEQ ID NO: 1286 - DNA, 16 bp, Artificial Sequence
  oligonucleotide - internucleotide bonds are phosphorothioate bonds (PS)
  modified_base (1)..(3): LNA nucleoside
  modified_base (13)..(16): LNA nucleoside
tctatggtgtatacgt

SEQ ID NO: 1287 - DNA, 16 bp, Artificial Sequence
  oligonucleotide - internucleotide bonds are phosphorothioate bonds (PS)
  modified_base (1)..(3): LNA nucleoside
  modified_base (15)..(16): LNA nucleoside
  modified_base (14)..(14): 5-methyl cytosine
tctatggtgtatacgt

SEQ ID NO: 1288 - DNA, 17 bp, Artificial Sequence
  oligonucleotide - internucleotide bonds are phosphorothioate bonds (PS)
  modified_base (1)..(3): LNA nucleoside
  modified_base (14)..(17): LNA nucleoside
ttctatggtgtatacgt

SEQ ID NO: 1289 - DNA, 17 bp, Artificial Sequence
  oligonucleotide - internucleotide bonds are phosphorothioate bonds (PS)
  modified_base (1)..(3): LNA nucleoside
  modified_base (16)..(17): LNA nucleoside
  modified_base (15)..(15): 5-methyl cytosine
ttctatggtgtatacgt

SEQ ID NO: 1290 - DNA, 17 bp, Artificial Sequence
  oligonucleotide - internucleotide bonds are phosphorothioate bonds (PS)
  modified_base (1)..(4): LNA nucleoside
  modified_base (14)..(17): LNA nucleoside
ttctatggtgtatacgt

SEQ ID NO: 1291 - DNA, 18 bp, Artificial Sequence
  oligonucleotide - internucleotide bonds are phosphorothioate bonds (PS)
  modified_base (1)..(3): LNA nucleoside
  modified_base (16)..(18): LNA nucleoside
attctatggtgtatacgt

SEQ ID NO: 1292 - DNA, 18 bp, Artificial Sequence
  oligonucleotide - internucleotide bonds are phosphorothioate bonds (PS)
  modified_base (1)..(4): LNA nucleoside
  modified_base (15)..(18): LNA nucleoside
attctatggtgtatacgt

SEQ ID NO: 1293 - DNA, 18 bp, Artificial Sequence
  oligonucleotide - internucleotide bonds are phosphorothioate bonds (PS)
  modified_base (1)..(2): LNA nucleoside
  modified_base (17)..(18): LNA nucleoside
  modified_base (16)..(16): 5-methyl cytosine
attctatggtgtatacgt

SEQ ID NO: 1294 - DNA, 19 bp, Artificial Sequence
  oligonucleotide - internucleotide bonds are phosphorothioate bonds (PS)
  modified_base (1)..(2): LNA nucleoside
  modified_base (18)..(19): LNA nucleoside
  modified_base (17)..(17): 5-methyl cytosine
tattctatggtgtatacgt

SEQ ID NO: 1295 - DNA, 19 bp, Artificial Sequence
  oligonucleotide - internucleotide bonds are phosphorothioate bonds (PS)
  modified_base (1)..(4): LNA nucleoside
  modified_base (16)..(19): LNA nucleoside
tattctatggtgtatacgt

SEQ ID NO: 1296 - DNA, 19 bp, Artificial Sequence
  oligonucleotide - internucleotide bonds are phosphorothioate bonds (PS)
  modified_base (1)..(2): LNA nucleoside
  modified_base (17)..(19): LNA nucleoside
tattctatggtgtatacgt

SEQ ID NO: 1297 - DNA, 20 bp, Artificial Sequence
  oligonucleotide - internucleotide bonds are phosphorothioate bonds (PS)
  modified_base (1)..(3): LNA nucleoside
  modified_base (19)..(20): LNA nucleoside
  modified_base (18)..(18): 5-methyl cytosine
gtattctatggtgtatacgt

SEQ ID NO: 1298 - DNA, 20 bp, Artificial Sequence
  oligonucleotide - internucleotide bonds are phosphorothioate bonds (PS)
  modified_base (1)..(2): LNA nucleoside
  modified_base (19)..(20): LNA nucleoside
  modified_base (18)..(18): 5-methyl cytosine
gtattctatggtgtatacgt

SEQ ID NO: 1299 - DNA, 20 bp, Artificial Sequence
  oligonucleotide - internucleotide bonds are phosphorothioate bonds (PS)
  modified_base (1)..(2): LNA nucleoside
  modified_base (18)..(20): LNA nucleoside
gtattctatggtgtatacgt

SEQ ID NO: 1300 - DNA, 14 bp, Artificial Sequence
  oligonucleotide - internucleotide bonds are phosphorothioate bonds (PS)
  modified_base (1)..(2): LNA nucleoside
  modified_base (11)..(14): LNA nucleoside
gagtccagatcagt

SEQ ID NO: 1301 - DNA, 14 bp, Artificial Sequence
  oligonucleotide - internucleotide bonds are phosphorothioate bonds (PS)
  modified_base (1)..(2): LNA nucleoside
  modified_base (13)..(14): LNA nucleoside
gagtccagatcagt

SEQ ID NO: 1302 - DNA, 14 bp, Artificial Sequence
  oligonucleotide - internucleotide bonds are phosphorothioate bonds (PS)
  modified_base (1)..(4): LNA nucleoside
  modified_base (11)..(14): LNA nucleoside
gagtccagatcagt

SEQ ID NO: 1303 - DNA, 15 bp, Artificial Sequence
  oligonucleotide - internucleotide bonds are phosphorothioate bonds (PS)
  modified_base (1)..(2): LNA nucleoside
  modified_base (14)..(15): LNA nucleoside
tgagtccagatcagt

SEQ ID NO: 1304 - DNA, 15 bp, Artificial Sequence
  oligonucleotide - internucleotide bonds are phosphorothioate bonds (PS)
  modified_base (1)..(2): LNA nucleoside
  modified_base (12)..(15): LNA nucleoside
tgagtccagatcagt

SEQ ID NO: 1305 - DNA, 15 bp, Artificial Sequence
  oligonucleotide - internucleotide bonds are phosphorothioate bonds (PS)
  modified_base (1)..(3): LNA nucleoside
  modified_base (12)..(15): LNA nucleoside
tgagtccagatcagt

SEQ ID NO: 1306 - DNA, 15 bp, Artificial Sequence
  oligonucleotide - internucleotide bonds are phosphorothioate bonds (PS)
  modified_base (1)..(4): LNA nucleoside
  modified_base (13)..(15): LNA nucleoside
aaggaagttatttct

SEQ ID NO: 1307 - DNA, 15 bp, Artificial Sequence
  oligonucleotide - internucleotide bonds are phosphorothioate bonds (PS)
  modified_base (1)..(4): LNA nucleoside
  modified_base (12)..(15): LNA nucleoside
aaggaagttatttct

SEQ ID NO: 1308 - DNA, 15 bp, Artificial Sequence
  oligonucleotide - internucleotide bonds are phosphorothioate bonds (PS)
  modified_base (1)..(3): LNA nucleoside
  modified_base (12)..(15): LNA nucleoside
aaggaagttatttct

SEQ ID NO: 1309 - DNA, 15 bp, Artificial Sequence
  oligonucleotide - internucleotide bonds are phosphorothioate bonds (PS)
  modified_base (1)..(3): LNA nucleoside
  modified_base (12)..(15): LNA nucleoside
gatttttgaaatcct

SEQ ID NO: 1310 - DNA, 15 bp, Artificial Sequence
  oligonucleotide - internucleotide bonds are phosphorothioate bonds (PS)
  modified_base (1)..(4): LNA nucleoside
  modified_base (12)..(15): LNA nucleoside
gatttttgaaatcct

SEQ ID NO: 1311 - DNA, 15 bp, Artificial Sequence
  oligonucleotide - internucleotide bonds are phosphorothioate bonds (PS)
  modified_base (1)..(4): LNA nucleoside
  modified_base (13)..(15): LNA nucleoside
gatttttgaaatcct

SEQ ID NO: 1312 - DNA, 14 bp, Artificial Sequence
  oligonucleotide - internucleotide bonds are phosphorothioate bonds (PS)
  modified_base (1)..(3): LNA nucleoside
  modified_base (11)..(14): LNA nucleoside
caacagtggaccct

SEQ ID NO: 1313 - DNA, 14 bp, Artificial Sequence
  oligonucleotide - internucleotide bonds are phosphorothioate bonds (PS)
  modified_base (1)..(2): LNA nucleoside
  modified_base (13)..(14): LNA nucleoside
caacagtggaccct

SEQ ID NO: 1314 - DNA, 14 bp, Artificial Sequence
  oligonucleotide - internucleotide bonds are phosphorothioate bonds (PS)
  modified_base (1)..(3): LNA nucleoside
  modified_base (12)..(14): LNA nucleoside
caacagtggaccct

SEQ ID NO: 1315 - DNA, 15 bp, Artificial Sequence
  oligonucleotide - internucleotide bonds are phosphorothioate bonds (PS)
  modified_base (1)..(3): LNA nucleoside
  modified_base (13)..(15): LNA nucleoside
cctgtctggaaacct

SEQ ID NO: 1316 - DNA, 15 bp, Artificial Sequence
  oligonucleotide - internucleotide bonds are phosphorothioate bonds (PS)
  modified_base (1)..(3): LNA nucleoside
  modified_base (14)..(15): LNA nucleoside
cctgtctggaaacct

SEQ ID NO: 1317 - DNA, 15 bp, Artificial Sequence
  oligonucleotide - internucleotide bonds are phosphorothioate bonds (PS)
  modified_base (1)..(2): LNA nucleoside
  modified_base (14)..(15): LNA nucleoside
cctgtctggaaacct

SEQ ID NO: 1318 - DNA, 14 bp, Artificial Sequence
  oligonucleotide - internucleotide bonds are phosphorothioate bonds (PS)
  modified_base (1)..(4): LNA nucleoside
  modified_base (13)..(14): LNA nucleoside
tgcctctgaggact

SEQ ID NO: 1319 - DNA, 14 bp, Artificial Sequence
  oligonucleotide - internucleotide bonds are phosphorothioate bonds (PS)
  modified_base (1)..(2): LNA nucleoside
  modified_base (13)..(14): LNA nucleoside
tgcctctgaggact

SEQ ID NO: 1320 - DNA, 14 bp, Artificial Sequence
  oligonucleotide - internucleotide bonds are phosphorothioate bonds (PS)
  modified_base (1)..(3): LNA nucleoside
  modified_base (13)..(14): LNA nucleoside
tgcctctgaggact

SEQ ID NO: 1321 - DNA, 14 bp, Artificial Sequence
  oligonucleotide - internucleotide bonds are phosphorothioate bonds (PS)
  modified_base (1)..(4): LNA nucleoside
  modified_base (11)..(14): LNA nucleoside
gggtagttttggat

SEQ ID NO: 1322 - DNA, 14 bp, Artificial Sequence
  oligonucleotide - internucleotide bonds are phosphorothioate bonds (PS)
  modified_base (1)..(3): LNA nucleoside
  modified_base (13)..(14): LNA nucleoside
gggtagttttggat

SEQ ID NO: 1323 - DNA, 14 bp, Artificial Sequence
  oligonucleotide - internucleotide bonds are phosphorothioate bonds (PS)
  modified_base (1)..(3): LNA nucleoside
  modified_base (11)..(14): LNA nucleoside
gggtagttttggat

SEQ ID NO: 1324 - DNA, 15 bp, Artificial Sequence
  oligonucleotide - internucleotide bonds are phosphorothioate bonds (PS)
  modified_base (1)..(2): LNA nucleoside
  modified_base (12)..(15): LNA nucleoside
tatggtgtatacgtg

SEQ ID NO: 1325 - DNA, 15 bp, Artificial Sequence
  oligonucleotide - internucleotide bonds are phosphorothioate bonds (PS)
  modified_base (1)..(3): LNA nucleoside
  modified_base (12)..(15): LNA nucleoside
tatggtgtatacgtg

SEQ ID NO: 1326 - DNA, 15 bp, Artificial Sequence
  oligonucleotide - internucleotide bonds are phosphorothioate bonds (PS)
  modified_base (1)..(4): LNA nucleoside
  modified_base (12)..(15): LNA nucleoside
tatggtgtatacgtg

SEQ ID NO: 1327 - DNA, 16 bp, Artificial Sequence
  oligonucleotide - internucleotide bonds are phosphorothioate bonds (PS)
  modified_base (1)..(4): LNA nucleoside
  modified_base (13)..(16): LNA nucleoside
ctatggtgtatacgtg

SEQ ID NO: 1328 - DNA, 16 bp, Artificial Sequence
  oligonucleotide - internucleotide bonds are phosphorothioate bonds (PS)
  modified_base (1)..(4): LNA nucleoside
  modified_base (14)..(16): LNA nucleoside
  modified_base (13)..(13): 5-methyl cytosine
ctatggtgtatacgtg

SEQ ID NO: 1329 - DNA, 16 bp, Artificial Sequence
  oligonucleotide - internucleotide bonds are phosphorothioate bonds (PS)
  modified_base (1)..(3): LNA nucleoside
  modified_base (15)..(16): LNA nucleoside
  modified_base (13)..(13): 5-methyl cytosine
ctatggtgtatacgtg

SEQ ID NO: 1330 - DNA, 17 bp, Artificial Sequence
  oligonucleotide - internucleotide bonds are phosphorothioate bonds (PS)
  modified_base (1)..(4): LNA nucleoside
  modified_base (16)..(17): LNA nucleoside
  modified_base (14)..(14): 5-methyl cytosine
tctatggtgtatacgtg

SEQ ID NO: 1331 - DNA, 17 bp, Artificial Sequence
  oligonucleotide - internucleotide bonds are phosphorothioate bonds (PS)
  modified_base (1)..(2): LNA nucleoside
  modified_base (16)..(17): LNA nucleoside
  modified_base (14)..(14): 5-methyl cytosine
tctatggtgtatacgtg

SEQ ID NO: 1332 - DNA, 17 bp, Artificial Sequence
  oligonucleotide - internucleotide bonds are phosphorothioate bonds (PS)
  modified_base (1)..(4): LNA nucleoside
  modified_base (14)..(17): LNA nucleoside
tctatggtgtatacgtg

SEQ ID NO: 1333 - DNA, 18 bp, Artificial Sequence
  oligonucleotide - internucleotide bonds are phosphorothioate bonds (PS)
  modified_base (1)..(2): LNA nucleoside
  modified_base (17)..(18): LNA nucleoside
  modified_base (15)..(15): 5-methyl cytosine
ttctatggtgtatacgtg

SEQ ID NO: 1334 - DNA, 18 bp, Artificial Sequence
  oligonucleotide - internucleotide bonds are phosphorothioate bonds (PS)
  modified_base (1)..(4): LNA nucleoside
  modified_base (15)..(18): LNA nucleoside
ttctatggtgtatacgtg

SEQ ID NO: 1335 - DNA, 18 bp, Artificial Sequence
  oligonucleotide - internucleotide bonds are phosphorothioate bonds (PS)
  modified_base (1)..(3): LNA nucleoside
  modified_base (16)..(18): LNA nucleoside
  modified_base (15)..(15): 5-methyl cytosine
ttctatggtgtatacgtg

SEQ ID NO: 1336 - DNA, 19 bp, Artificial Sequence
  oligonucleotide - internucleotide bonds are phosphorothioate bonds (PS)
  modified_base (1)..(2): LNA nucleoside
  modified_base (18)..(19): LNA nucleoside
  modified_base (16)..(16): 5-methyl cytosine
attctatggtgtatacgtg

SEQ ID NO: 1337 - DNA, 19 bp, Artificial Sequence
  oligonucleotide - internucleotide bonds are phosphorothioate bonds (PS)
  modified_base (1)..(3): LNA nucleoside
  modified_base (16)..(19): LNA nucleoside
attctatggtgtatacgtg

SEQ ID NO: 1338 - DNA, 19 bp, Artificial Sequence
  oligonucleotide - internucleotide bonds are phosphorothioate bonds (PS)
  modified_base (1)..(2): LNA nucleoside
  modified_base (17)..(19): LNA nucleoside
  modified_base (16)..(16): 5-methyl cytosine
attctatggtgtatacgtg

SEQ ID NO: 1339 - DNA, 20 bp, Artificial Sequence
  oligonucleotide - internucleotide bonds are phosphorothioate bonds (PS)
  modified_base (1)..(2): LNA nucleoside
  modified_base (18)..(20): LNA nucleoside
  modified_base (17)..(17): 5-methyl cytosine
tattctatggtgtatacgtg

SEQ ID NO: 1340 - DNA, 20 bp, Artificial Sequence
  oligonucleotide - internucleotide bonds are phosphorothioate bonds (PS)
  modified_base (1)..(2): LNA nucleoside
  modified_base (19)..(20): LNA nucleoside
  modified_base (17)..(17): 5-methyl cytosine
tattctatggtgtatacgtg

SEQ ID NO: 1341 - DNA, 20 bp, Artificial Sequence
  oligonucleotide - internucleotide bonds are phosphorothioate bonds (PS)
  modified_base (1)..(4): LNA nucleoside
  modified_base (18)..(20): LNA nucleoside
  modified_base (17)..(17): 5-methyl cytosine
tattctatggtgtatacgtg

SEQ ID NO: 1342 - DNA, 14 bp, Artificial Sequence
  oligonucleotide - internucleotide bonds are phosphorothioate bonds (PS)
  modified_base (1)..(3): LNA nucleoside
  modified_base (11)..(14): LNA nucleoside
tctgaggcagaatg

SEQ ID NO: 1343 - DNA, 14 bp, Artificial Sequence
  oligonucleotide - internucleotide bonds are phosphorothioate bonds (PS)
  modified_base (1)..(4): LNA nucleoside
  modified_base (11)..(14): LNA nucleoside
tctgaggcagaatg

SEQ ID NO: 1344 - DNA, 14 bp, Artificial Sequence
  oligonucleotide - internucleotide bonds are phosphorothioate bonds (PS)
  modified_base (1)..(4): LNA nucleoside
  modified_base (12)..(14): LNA nucleoside
tctgaggcagaatg

SEQ ID NO: 1345 - DNA, 14 bp, Artificial Sequence
  oligonucleotide - internucleotide bonds are phosphorothioate bonds (PS)
  modified_base (1)..(3): LNA nucleoside
  modified_base (11)..(14): LNA nucleoside
ctatggtgtatacg

SEQ ID NO: 1346 - DNA, 14 bp, Artificial Sequence
  oligonucleotide - internucleotide bonds are phosphorothioate bonds (PS)
  modified_base (1)..(4): LNA nucleoside
  modified_base (12)..(14): LNA nucleoside
ctatggtgtatacg

SEQ ID NO: 1347 - DNA, 14 bp, Artificial Sequence
  oligonucleotide - internucleotide bonds are phosphorothioate bonds (PS)
  modified_base (1)..(4): LNA nucleoside
  modified_base (11)..(14): LNA nucleoside
ctatggtgtatacg

SEQ ID NO: 1348 - DNA, 15 bp, Artificial Sequence
  oligonucleotide - internucleotide bonds are phosphorothioate bonds (PS)
  modified_base (1)..(4): LNA nucleoside
  modified_base (12)..(15): LNA nucleoside
tctatggtgtatacg

SEQ ID NO: 1349 - DNA, 15 bp, Artificial Sequence
  oligonucleotide - internucleotide bonds are phosphorothioate bonds (PS)
  modified_base (1)..(3): LNA nucleoside
  modified_base (12)..(15): LNA nucleoside
tctatggtgtatacg

SEQ ID NO: 1350 - DNA, 15 bp, Artificial Sequence
  oligonucleotide - internucleotide bonds are phosphorothioate bonds (PS)
  modified_base (1)..(4): LNA nucleoside
  modified_base (14)..(15): LNA nucleoside
tctatggtgtatacg

SEQ ID NO: 1351 - DNA, 16 bp, Artificial Sequence
  oligonucleotide - internucleotide bonds are phosphorothioate bonds (PS)
  modified_base (1)..(3): LNA nucleoside
  modified_base (13)..(16): LNA nucleoside
ttctatggtgtatacg

SEQ ID NO: 1352 - DNA, 16 bp, Artificial Sequence
  oligonucleotide - internucleotide bonds are phosphorothioate bonds (PS)
  modified_base (1)..(4): LNA nucleoside
  modified_base (13)..(16): LNA nucleoside
ttctatggtgtatacg

SEQ ID NO: 1353 - DNA, 16 bp, Artificial Sequence
  oligonucleotide - internucleotide bonds are phosphorothioate bonds (PS)
  modified_base (1)..(2): LNA nucleoside
  modified_base (13)..(16): LNA nucleoside
ttctatggtgtatacg

SEQ ID NO: 1354 - DNA, 17 bp, Artificial Sequence
  oligonucleotide - internucleotide bonds are phosphorothioate bonds (PS)
  modified_base (1)..(3): LNA nucleoside
  modified_base (14)..(17): LNA nucleoside
attctatggtgtatacg

SEQ ID NO: 1355 - DNA, 17 bp, Artificial Sequence
  oligonucleotide - internucleotide bonds are phosphorothioate bonds (PS)
  modified_base (1)..(4): LNA nucleoside
  modified_base (14)..(17): LNA nucleoside
attctatggtgtatacg

SEQ ID NO: 1356 - DNA, 17 bp, Artificial Sequence
  oligonucleotide - internucleotide bonds are phosphorothioate bonds (PS)
  modified_base (1)..(3): LNA nucleoside
  modified_base (15)..(17): LNA nucleoside
attctatggtgtatacg

SEQ ID NO: 1357 - DNA, 18 bp, Artificial Sequence
  oligonucleotide - internucleotide bonds are phosphorothioate bonds (PS)
  modified_base (1)..(2): LNA nucleoside
  modified_base (16)..(18): LNA nucleoside
tattctatggtgtatacg

SEQ ID NO: 1358 - DNA, 18 bp, Artificial Sequence
  oligonucleotide - internucleotide bonds are phosphorothioate bonds (PS)
  modified_base (1)..(4): LNA nucleoside
  modified_base (15)..(18): LNA nucleoside
tattctatggtgtatacg

SEQ ID NO: 1359 - DNA, 18 bp, Artificial Sequence
  oligonucleotide - internucleotide bonds are phosphorothioate bonds (PS)
  modified_base (1)..(3): LNA nucleoside
  modified_base (15)..(18): LNA nucleoside
tattctatggtgtatacg

SEQ ID NO: 1360 - DNA, 19 bp, Artificial Sequence
  oligonucleotide - internucleotide bonds are phosphorothioate bonds (PS)
  modified_base (1)..(3): LNA nucleoside
  modified_base (18)..(19): LNA nucleoside
gtattctatggtgtatacg

SEQ ID NO: 1361 - DNA, 19 bp, Artificial Sequence
  oligonucleotide - internucleotide bonds are phosphorothioate bonds (PS)
  modified_base (1)..(3): LNA nucleoside
  modified_base (16)..(19): LNA nucleoside
gtattctatggtgtatacg

SEQ ID NO: 1362 - DNA, 19 bp, Artificial Sequence
  oligonucleotide - internucleotide bonds are phosphorothioate bonds (PS)
  modified_base (1)..(2): LNA nucleoside
  modified_base (18)..(19): LNA nucleoside
gtattctatggtgtatacg

SEQ ID NO: 1363 - DNA, 20 bp, Artificial Sequence
  oligonucleotide - internucleotide bonds are phosphorothioate bonds (PS)
  modified_base (1)..(2): LNA nucleoside
  modified_base (19)..(20): LNA nucleoside
agtattctatggtgtatacg

SEQ ID NO: 1364 - DNA, 20 bp, Artificial Sequence
  oligonucleotide - internucleotide bonds are phosphorothioate bonds (PS)
  modified_base (1)..(2): LNA nucleoside
  modified_base (18)..(20): LNA nucleoside
agtattctatggtgtatacg

SEQ ID NO: 1365 - DNA, 20 bp, Artificial Sequence
  oligonucleotide - internucleotide bonds are phosphorothioate bonds (PS)
  modified_base (1)..(4): LNA nucleoside
  modified_base (19)..(20): LNA nucleoside
agtattctatggtgtatacg

SEQ ID NO: 1366 - DNA, 14 bp, Artificial Sequence
  oligonucleotide - internucleotide bonds are phosphorothioate bonds (PS)
  modified_base (1)..(4): LNA nucleoside
  modified_base (11)..(14): LNA nucleoside
gcattgcactttag

SEQ ID NO: 1367 - DNA, 14 bp, Artificial Sequence
  oligonucleotide - internucleotide bonds are phosphorothioate bonds (PS)
  modified_base (1)..(4): LNA nucleoside
  modified_base (12)..(14): LNA nucleoside
gcattgcactttag

SEQ ID NO: 1368 - DNA, 14 bp, Artificial Sequence
  oligonucleotide - internucleotide bonds are phosphorothioate bonds (PS)
  modified_base (1)..(2): LNA nucleoside
  modified_base (12)..(14): LNA nucleoside
gcattgcactttag

SEQ ID NO: 1369 - DNA, 14 bp, Artificial Sequence
  oligonucleotide - internucleotide bonds are phosphorothioate bonds (PS)
  modified_base (1)..(3): LNA nucleoside
  modified_base (13)..(14): LNA nucleoside
tgagtccagatcag

SEQ ID NO: 1370 - DNA, 14 bp, Artificial Sequence
  oligonucleotide - internucleotide bonds are phosphorothioate bonds (PS)
  modified_base (1)..(4): LNA nucleoside
  modified_base (12)..(14): LNA nucleoside
tgagtccagatcag

SEQ ID NO: 1371 - DNA, 14 bp, Artificial Sequence
  oligonucleotide - internucleotide bonds are phosphorothioate bonds (PS)
  modified_base (1)..(4): LNA nucleoside
  modified_base (11)..(14): LNA nucleoside
tgagtccagatcag

SEQ ID NO: 1372 - DNA, 14 bp, Artificial Sequence
  oligonucleotide - internucleotide bonds are phosphorothioate bonds (PS)
  modified_base (1)..(3): LNA nucleoside
  modified_base (11)..(14): LNA nucleoside
tgagagatgttatc

SEQ ID NO: 1373 - DNA, 14 bp, Artificial Sequence
  oligonucleotide - internucleotide bonds are phosphorothioate bonds (PS)
  modified_base (1)..(4): LNA nucleoside
  modified_base (11)..(14): LNA nucleoside
tgagagatgttatc

SEQ ID NO: 1374 - DNA, 14 bp, Artificial Sequence
  oligonucleotide - internucleotide bonds are phosphorothioate bonds (PS)
  modified_base (1)..(4): LNA nucleoside
  modified_base (12)..(14): LNA nucleoside
tgagagatgttatc

SEQ ID NO: 1375 - DNA, 15 bp, Artificial Sequence
  oligonucleotide - internucleotide bonds are phosphorothioate bonds (PS)
  modified_base (1)..(3): LNA nucleoside
  modified_base (12)..(15): LNA nucleoside
ctgagagatgttatc

SEQ ID NO: 1376 - DNA, 15 bp, Artificial Sequence
  oligonucleotide - internucleotide bonds are phosphorothioate bonds (PS)
  modified_base (1)..(4): LNA nucleoside
  modified_base (13)..(15): LNA nucleoside
ctgagagatgttatc

SEQ ID NO: 1377 - DNA, 15 bp, Artificial Sequence
  oligonucleotide - internucleotide bonds are phosphorothioate bonds (PS)
  modified_base (1)..(4): LNA nucleoside
  modified_base (12)..(15): LNA nucleoside
ctgagagatgttatc

SEQ ID NO: 1378 - DNA, 16 bp, Artificial Sequence
  oligonucleotide - internucleotide bonds are phosphorothioate bonds (PS)
  modified_base (1)..(4): LNA nucleoside
  modified_base (14)..(16): LNA nucleoside
  modified_base (12)..(12): 5-methyl cytosine
tatggtgtatacgtgc

SEQ ID NO: 1379 - DNA, 16 bp, Artificial Sequence
  oligonucleotide - internucleotide bonds are phosphorothioate bonds (PS)
  modified_base (1)..(2): LNA nucleoside
  modified_base (13)..(16): LNA nucleoside
  modified_base (12)..(12): 5-methyl cytosine
tatggtgtatacgtgc

SEQ ID NO: 1380 - DNA, 16 bp, Artificial Sequence
  oligonucleotide - internucleotide bonds are phosphorothioate bonds (PS)
  modified_base (1)..(2): LNA nucleoside
  modified_base (15)..(16): LNA nucleoside
  modified_base (12)..(12): 5-methyl cytosine
tatggtgtatacgtgc

SEQ ID NO: 1381 - DNA, 17 bp, Artificial Sequence
  oligonucleotide - internucleotide bonds are phosphorothioate bonds (PS)
  modified_base (1)..(2): LNA nucleoside
  modified_base (16)..(17): LNA nucleoside
  modified_base (13)..(13): 5-methyl cytosine
ctatggtgtatacgtgc

SEQ ID NO: 1382 - DNA, 17 bp, Artificial Sequence
  oligonucleotide - internucleotide bonds are phosphorothioate bonds (PS)
  modified_base (1)..(2): LNA nucleoside
  modified_base (14)..(17): LNA nucleoside
  modified_base (13)..(13): 5-methyl cytosine
ctatggtgtatacgtgc

SEQ ID NO: 1383 - DNA, 17 bp, Artificial Sequence
  oligonucleotide - internucleotide bonds are phosphorothioate bonds (PS)
  modified_base (1)..(3): LNA nucleoside
  modified_base (16)..(17): LNA nucleoside
  modified_base (13)..(13): 5-methyl cytosine
ctatggtgtatacgtgc

SEQ ID NO: 1384 - DNA, 18 bp, Artificial Sequence
  oligonucleotide - internucleotide bonds are phosphorothioate bonds (PS)
  modified_base (1)..(4): LNA nucleoside
  modified_base (17)..(18): LNA nucleoside
  modified_base (14)..(14): 5-methyl cytosine
tctatggtgtatacgtgc

SEQ ID NO: 1385 - DNA, 18 bp, Artificial Sequence
  oligonucleotide - internucleotide bonds are phosphorothioate bonds (PS)
  modified_base (1)..(3): LNA nucleoside
  modified_base (17)..(18): LNA nucleoside
  modified_base (14)..(14): 5-methyl cytosine
tctatggtgtatacgtgc

SEQ ID NO: 1386 - DNA, 18 bp, Artificial Sequence
  oligonucleotide - internucleotide bonds are phosphorothioate bonds (PS)
  modified_base (1)..(2): LNA nucleoside
  modified_base (17)..(18): LNA nucleoside
  modified_base (14)..(14): 5-methyl cytosine
tctatggtgtatacgtgc

SEQ ID NO: 1387 - DNA, 19 bp, Artificial Sequence
  oligonucleotide - internucleotide bonds are phosphorothioate bonds (PS)
  modified_base (1)..(2): LNA nucleoside
  modified_base (18)..(19): LNA nucleoside
  modified_base (15)..(15): 5-methyl cytosine
ttctatggtgtatacgtgc

SEQ ID NO: 1388 - DNA, 19 bp, Artificial Sequence
  oligonucleotide - internucleotide bonds are phosphorothioate bonds (PS)
  modified_base (1)..(2): LNA nucleoside
  modified_base (17)..(19): LNA nucleoside
  modified_base (15)..(15): 5-methyl cytosine
ttctatggtgtatacgtgc

SEQ ID NO: 1389 - DNA, 19 bp, Artificial Sequence
  oligonucleotide - internucleotide bonds are phosphorothioate bonds (PS)
  modified_base (1)..(3): LNA nucleoside
  modified_base (18)..(19): LNA nucleoside
  modified_base (15)..(15): 5-methyl cytosine
ttctatggtgtatacgtgc

SEQ ID NO: 1390 - DNA, 20 bp, Artificial Sequence
  oligonucleotide - internucleotide bonds are phosphorothioate bonds (PS)
  modified_base (1)..(2): LNA nucleoside
  modified_base (18)..(20): LNA nucleoside
  modified_base (16)..(16): 5-methyl cytosine
attctatggtgtatacgtgc

SEQ ID NO: 1391 - DNA, 20 bp, Artificial Sequence
  oligonucleotide - internucleotide bonds are phosphorothioate bonds (PS)
  modified_base (1)..(2): LNA nucleoside
  modified_base (19)..(20): LNA nucleoside
  modified_base (16)..(16): 5-methyl cytosine
attctatggtgtatacgtgc

SEQ ID NO: 1392 - DNA, 20 bp, Artificial Sequence
  oligonucleotide - internucleotide bonds are phosphorothioate bonds (PS)
  modified_base (1)..(3): LNA nucleoside
  modified_base (19)..(20): LNA nucleoside
  modified_base (16)..(16): 5-methyl cytosine
attctatggtgtatacgtgc

SEQ ID NO: 1393 - DNA, 17 bp, Artificial Sequence
  oligonucleotide - internucleotide bonds are phosphorothioate bonds (PS)
  modified_base (1)..(3): LNA nucleoside
  modified_base (16)..(17): LNA nucleoside
  modified_base (12)..(12): 5-methyl cytosine
tatggtgtatacgtgcc

SEQ ID NO: 1394 - DNA, 17 bp, Artificial Sequence
  oligonucleotide - internucleotide bonds are phosphorothioate bonds (PS)
  modified_base (1)..(2): LNA nucleoside
  modified_base (15)..(17): LNA nucleoside
  modified_base (12)..(12): 5-methyl cytosine
tatggtgtatacgtgcc

SEQ ID NO: 1395 - DNA, 17 bp, Artificial Sequence
  oligonucleotide - internucleotide bonds are phosphorothioate bonds (PS)
  modified_base (1)..(2): LNA nucleoside
  modified_base (16)..(17): LNA nucleoside
  modified_base (12)..(12): 5-methyl cytosine
tatggtgtatacgtgcc

SEQ ID NO: 1396 - DNA, 18 bp, Artificial Sequence
  oligonucleotide - internucleotide bonds are phosphorothioate bonds (PS)
  modified_base (1)..(2): LNA nucleoside
  modified_base (17)..(18): LNA nucleoside
  modified_base (13)..(13): 5-methyl cytosine
ctatggtgtatacgtgcc

SEQ ID NO: 1397 - DNA, 18 bp, Artificial Sequence
  oligonucleotide - internucleotide bonds are phosphorothioate bonds (PS)
  modified_base (1)..(2): LNA nucleoside
  modified_base (16)..(18): LNA nucleoside
  modified_base (13)..(13): 5-methyl cytosine
ctatggtgtatacgtgcc

SEQ ID NO: 1398 - DNA, 18 bp, Artificial Sequence
  oligonucleotide - internucleotide bonds are phosphorothioate bonds (PS)
  modified_base (1)..(3): LNA nucleoside
  modified_base (17)..(18): LNA nucleoside
  modified_base (13)..(13): 5-methyl cytosine
ctatggtgtatacgtgcc

SEQ ID NO: 1399 - DNA, 19 bp, Artificial Sequence
  oligonucleotide - internucleotide bonds are phosphorothioate bonds (PS)
  modified_base (1)..(2): LNA nucleoside
  modified_base (17)..(19): LNA nucleoside
  modified_base (14)..(14): 5-methyl cytosine
tctatggtgtatacgtgcc

SEQ ID NO: 1400 - DNA, 19 bp, Artificial Sequence
  oligonucleotide - internucleotide bonds are phosphorothioate bonds (PS)
  modified_base (1)..(3): LNA nucleoside
  modified_base (18)..(19): LNA nucleoside
  modified_base (14)..(14): 5-methyl cytosine
tctatggtgtatacgtgcc

SEQ ID NO: 1401 - DNA, 19 bp, Artificial Sequence
  oligonucleotide - internucleotide bonds are phosphorothioate bonds (PS)
  modified_base (1)..(2): LNA nucleoside
  modified_base (18)..(19): LNA nucleoside
  modified_base (14)..(14): 5-methyl cytosine
tctatggtgtatacgtgcc

SEQ ID NO: 1402 - DNA, 20 bp, Artificial Sequence
  oligonucleotide - internucleotide bonds are phosphorothioate bonds (PS)
  modified_base (1)..(2): LNA nucleoside
  modified_base (19)..(20): LNA nucleoside
  modified_base (15)..(15): 5-methyl cytosine
ttctatggtgtatacgtgcc

SEQ ID NO: 1403 - DNA, 20 bp, Artificial Sequence
  oligonucleotide - internucleotide bonds are phosphorothioate bonds (PS)
  modified_base (1)..(2): LNA nucleoside
  modified_base (18)..(20): LNA nucleoside
  modified_base (15)..(15): 5-methyl cytosine
ttctatggtgtatacgtgcc

SEQ ID NO: 1404 - DNA, 20 bp, Artificial Sequence
  oligonucleotide - internucleotide bonds are phosphorothioate bonds (PS)
  modified_base (1)..(3): LNA nucleoside
  modified_base (19)..(20): LNA nucleoside
  modified_base (15)..(15): 5-methyl cytosine
ttctatggtgtatacgtgcc

SEQ ID NO: 1405 - DNA, 17 bp, Artificial Sequence
  oligonucleotide - internucleotide bonds are phosphorothioate bonds (PS)
  modified_base (1)..(4): LNA nucleoside
  modified_base (14)..(17): LNA nucleoside
tattctatggtgtatac

SEQ ID NO: 1406 - DNA, 17 bp, Artificial Sequence
  oligonucleotide - internucleotide bonds are phosphorothioate bonds (PS)
  modified_base (1)..(3): LNA nucleoside
  modified_base (15)..(17): LNA nucleoside
tattctatggtgtatac

SEQ ID NO: 1407 - DNA, 17 bp, Artificial Sequence
  oligonucleotide - internucleotide bonds are phosphorothioate bonds (PS)
  modified_base (1)..(3): LNA nucleoside
  modified_base (14)..(17): LNA nucleoside
tattctatggtgtatac

SEQ ID NO: 1408 - DNA, 18 bp, Artificial Sequence
  oligonucleotide - internucleotide bonds are phosphorothioate bonds (PS)
  modified_base (1)..(4): LNA nucleoside
  modified_base (15)..(18): LNA nucleoside
gtattctatggtgtatac

SEQ ID NO: 1409 - DNA, 18 bp, Artificial Sequence
  oligonucleotide - internucleotide bonds are phosphorothioate bonds (PS)
  modified_base (1)..(3): LNA nucleoside
  modified_base (15)..(18): LNA nucleoside
gtattctatggtgtatac

SEQ ID NO: 1410 - DNA, 18 bp, Artificial Sequence
  oligonucleotide - internucleotide bonds are phosphorothioate bonds (PS)
  modified_base (1)..(2): LNA nucleoside
  modified_base (17)..(18): LNA nucleoside
gtattctatggtgtatac

SEQ ID NO: 1411 - DNA, 19 bp, Artificial Sequence
  oligonucleotide - internucleotide bonds are phosphorothioate bonds (PS)
  modified_base (1)..(2): LNA nucleoside
  modified_base (18)..(19): LNA nucleoside
agtattctatggtgtatac

SEQ ID NO: 1412 - DNA, 19 bp, Artificial Sequence
  oligonucleotide - internucleotide bonds are phosphorothioate bonds (PS)
  modified_base (1)..(4): LNA nucleoside
  modified_base (16)..(19): LNA nucleoside
agtattctatggtgtatac

SEQ ID NO: 1413 - DNA, 19 bp, Artificial Sequence
  oligonucleotide - internucleotide bonds are phosphorothioate bonds (PS)
  modified_base (1)..(2): LNA nucleoside
  modified_base (16)..(19): LNA nucleoside
agtattctatggtgtatac

SEQ ID NO: 1414 - DNA, 20 bp, Artificial Sequence
  oligonucleotide - internucleotide bonds are phosphorothioate bonds (PS)
  modified_base (1)..(2): LNA nucleoside
  modified_base (18)..(20): LNA nucleoside
tagtattctatggtgtatac

SEQ ID NO: 1415 - DNA, 20 bp, Artificial Sequence
  oligonucleotide - internucleotide bonds are phosphorothioate bonds (PS)
  modified_base (1)..(2): LNA nucleoside
  modified_base (19)..(20): LNA nucleoside
tagtattctatggtgtatac

SEQ ID NO: 1416 - DNA, 20 bp, Artificial Sequence
  oligonucleotide - internucleotide bonds are phosphorothioate bonds (PS)
  modified_base (1)..(4): LNA nucleoside
  modified_base (18)..(20): LNA nucleoside
tagtattctatggtgtatac

SEQ ID NO: 1417 - DNA, 19 bp, Artificial Sequence
  oligonucleotide - internucleotide bonds are phosphorothioate bonds (PS)
  modified_base (1)..(2): LNA nucleoside
  modified_base (18)..(19): LNA nucleoside
  modified_base (12)..(12): 5-methyl cytosine
tatggtgtatacgtgccac

SEQ ID NO: 1418 - DNA, 19 bp, Artificial Sequence
  oligonucleotide - internucleotide bonds are phosphorothioate bonds (PS)
  modified_base (1)..(3): LNA nucleoside
  modified_base (18)..(19): LNA nucleoside
  modified_base (12)..(12): 5-methyl cytosine
tatggtgtatacgtgccac

SEQ ID NO: 1419 - DNA, 19 bp, Artificial Sequence
  oligonucleotide - internucleotide bonds are phosphorothioate bonds (PS)
  modified_base (1)..(2): LNA nucleoside
  modified_base (17)..(19): LNA nucleoside
  modified_base (12)..(12): 5-methyl cytosine
tatggtgtatacgtgccac

SEQ ID NO: 1420 - DNA, 20 bp, Artificial Sequence
  oligonucleotide - internucleotide bonds are phosphorothioate bonds (PS)
  modified_base (1)..(3): LNA nucleoside
  modified_base (19)..(20): LNA nucleoside
  modified_base (13)..(13): 5-methyl cytosine
ctatggtgtatacgtgccac

SEQ ID NO: 1421 - DNA, 20 bp, Artificial Sequence
  oligonucleotide - internucleotide bonds are phosphorothioate bonds (PS)
  modified_base (1)..(2): LNA nucleoside
  modified_base (19)..(20): LNA nucleoside
  modified_base (13)..(13): 5-methyl cytosine
ctatggtgtatacgtgccac

SEQ ID NO: 1422 - DNA, 20 bp, Artificial Sequence
  oligonucleotide - internucleotide bonds are phosphorothioate bonds (PS)
  modified_base (1)..(2): LNA nucleoside
  modified_base (18)..(20): LNA nucleoside
  modified_base (13)..(13): 5-methyl cytosine
ctatggtgtatacgtgccac

SEQ ID NO: 1423 - DNA, 15 bp, Artificial Sequence
  oligonucleotide - internucleotide bonds are phosphorothioate bonds (PS)
  modified_base (1)..(4): LNA nucleoside
  modified_base (12)..(15): LNA nucleoside
actatgcatttgtta

SEQ ID NO: 1424 - DNA, 15 bp, Artificial Sequence
  oligonucleotide - internucleotide bonds are phosphorothioate bonds (PS)
  modified_base (1)..(4): LNA nucleoside
  modified_base (13)..(15): LNA nucleoside
actatgcatttgtta

SEQ ID NO: 1425 - DNA, 15 bp, Artificial Sequence
  oligonucleotide - internucleotide bonds are phosphorothioate bonds (PS)
  modified_base (1)..(3): LNA nucleoside
  modified_base (12)..(15): LNA nucleoside
actatgcatttgtta

SEQ ID NO: 1426 - DNA, 16 bp, Artificial Sequence
  oligonucleotide - internucleotide bonds are phosphorothioate bonds (PS)
  modified_base (1)..(3): LNA nucleoside
  modified_base (13)..(16): LNA nucleoside
aaattcagaaaacata

SEQ ID NO: 1427 - DNA, 16 bp, Artificial Sequence
  oligonucleotide - internucleotide bonds are phosphorothioate bonds (PS)
  modified_base (1)..(4): LNA nucleoside
  modified_base (13)..(16): LNA nucleoside
aaattcagaaaacata

SEQ ID NO: 1428 - DNA, 16 bp, Artificial Sequence
  oligonucleotide - internucleotide bonds are phosphorothioate bonds (PS)
  modified_base (1)..(2): LNA nucleoside
  modified_base (13)..(16): LNA nucleoside
aaattcagaaaacata

SEQ ID NO: 1429 - DNA, 18 bp, Artificial Sequence
  oligonucleotide - internucleotide bonds are phosphorothioate bonds (PS)
  modified_base (1)..(2): LNA nucleoside
  modified_base (16)..(18): LNA nucleoside
  modified_base (12)..(12): 5-methyl cytosine
tatggtgtatacgtgcca

SEQ ID NO: 1430 - DNA, 18 bp, Artificial Sequence
  oligonucleotide - internucleotide bonds are phosphorothioate bonds (PS)
  modified_base (1)..(3): LNA nucleoside
  modified_base (17)..(18): LNA nucleoside
  modified_base (12)..(12): 5-methyl cytosine
tatggtgtatacgtgcca

SEQ ID NO: 1431 - DNA, 18 bp, Artificial Sequence
  oligonucleotide - internucleotide bonds are phosphorothioate bonds (PS)
  modified_base (1)..(2): LNA nucleoside
  modified_base (17)..(18): LNA nucleoside
  modified_base (12)..(12): 5-methyl cytosine
tatggtgtatacgtgcca

SEQ ID NO: 1432 - DNA, 19 bp, Artificial Sequence
  oligonucleotide - internucleotide bonds are phosphorothioate bonds (PS)
  modified_base (1)..(3): LNA nucleoside
  modified_base (18)..(19): LNA nucleoside
  modified_base (13)..(13): 5-methyl cytosine
ctatggtgtatacgtgcca

SEQ ID NO: 1433 - DNA, 19 bp, Artificial Sequence
  oligonucleotide - internucleotide bonds are phosphorothioate bonds (PS)
  modified_base (1)..(2): LNA nucleoside
  modified_base (18)..(19): LNA nucleoside
  modified_base (13)..(13): 5-methyl cytosine
ctatggtgtatacgtgcca

SEQ ID NO: 1434 - DNA, 19 bp, Artificial Sequence
  oligonucleotide - internucleotide bonds are phosphorothioate bonds (PS)
  modified_base (1)..(2): LNA nucleoside
  modified_base (17)..(19): LNA nucleoside
  modified_base (13)..(13): 5-methyl cytosine
ctatggtgtatacgtgcca

SEQ ID NO: 1435 - DNA, 20 bp, Artificial Sequence
  oligonucleotide - internucleotide bonds are phosphorothioate bonds (PS)
  modified_base (1)..(2): LNA nucleoside
  modified_base (19)..(20): LNA nucleoside
  modified_base (14)..(14): 5-methyl cytosine
tctatggtgtatacgtgcca

SEQ ID NO: 1436 - DNA, 20 bp, Artificial Sequence
  oligonucleotide - internucleotide bonds are phosphorothioate bonds (PS)
  modified_base (1)..(2): LNA nucleoside
  modified_base (18)..(20): LNA nucleoside
  modified_base (14)..(14): 5-methyl cytosine
tctatggtgtatacgtgcca

SEQ ID NO: 1437 - DNA, 20 bp, Artificial Sequence
  oligonucleotide - internucleotide bonds are phosphorothioate bonds (PS)
  modified_base (1)..(3): LNA nucleoside
  modified_base (19)..(20): LNA nucleoside
  modified_base (14)..(14): 5-methyl cytosine
tctatggtgtatacgtgcca

SEQ ID NO: 1438 - DNA, 14 bp, Artificial Sequence
  oligonucleotide - internucleotide bonds are phosphorothioate bonds (PS)
  modified_base (1)..(2): LNA nucleoside
  modified_base (11)..(14): LNA nucleoside
acctgagtgttaca

SEQ ID NO: 1439 - DNA, 14 bp, Artificial Sequence
  oligonucleotide - internucleotide bonds are phosphorothioate bonds (PS)
  modified_base (1)..(4): LNA nucleoside
  modified_base (11)..(14): LNA nucleoside
acctgagtgttaca

SEQ ID NO: 1440 - DNA, 14 bp, Artificial Sequence
  oligonucleotide - internucleotide bonds are phosphorothioate bonds (PS)
  modified_base (1)..(3): LNA nucleoside
  modified_base (11)..(14): LNA nucleoside
acctgagtgttaca

SEQ ID NO: 1441 - DNA, 20 bp, Artificial Sequence
  oligonucleotide - internucleotide bonds are phosphorothioate bonds (PS)
  modified_base (1)..(3): LNA nucleoside
  modified_base (19)..(20): LNA nucleoside
  modified_base (12)..(12): 5-methyl cytosine
tatggtgtatacgtgccaca

SEQ ID NO: 1442 - DNA, 20 bp, Artificial Sequence
  oligonucleotide - internucleotide bonds are phosphorothioate bonds (PS)
  modified_base (1)..(2): LNA nucleoside
  modified_base (19)..(20): LNA nucleoside
  modified_base (12)..(12): 5-methyl cytosine
tatggtgtatacgtgccaca

SEQ ID NO: 1443 - DNA, 20 bp, Artificial Sequence
  oligonucleotide - internucleotide bonds are phosphorothioate bonds (PS)
  modified_base (1)..(2): LNA nucleoside
  modified_base (18)..(20): LNA nucleoside
  modified_base (12)..(12): 5-methyl cytosine
tatggtgtatacgtgccaca

SEQ ID NO: 1444 - DNA, 16 bp, Artificial Sequence
  oligonucleotide - internucleotide bonds are phosphorothioate bonds (PS)
  modified_base (1)..(4): LNA nucleoside
  modified_base (14)..(16): LNA nucleoside
actatgcatttgttaa

SEQ ID NO: 1445 - DNA, 16 bp, Artificial Sequence
  oligonucleotide - internucleotide bonds are phosphorothioate bonds (PS)
  modified_base (1)..(4): LNA nucleoside
  modified_base (13)..(16): LNA nucleoside
actatgcatttgttaa

SEQ ID NO: 1446 - DNA, 16 bp, Artificial Sequence
  oligonucleotide - internucleotide bonds are phosphorothioate bonds (PS)
  modified_base (1)..(3): LNA nucleoside
  modified_base (13)..(16): LNA nucleoside
actatgcatttgttaa

SEQ ID NO: 1447 - DNA, 16 bp, Artificial Sequence
  oligonucleotide - internucleotide bonds are phosphorothioate bonds (PS)
  modified_base (1)..(4): LNA nucleoside
  modified_base (13)..(16): LNA nucleoside
ctatgcatttgttaaa

SEQ ID NO: 1448 - DNA, 16 bp, Artificial Sequence
  oligonucleotide - internucleotide bonds are phosphorothioate bonds (PS)
  modified_base (1)..(4): LNA nucleoside
  modified_base (14)..(16): LNA nucleoside
ctatgcatttgttaaa

SEQ ID NO: 1449 - DNA, 16 bp, Artificial Sequence
  oligonucleotide - internucleotide bonds are phosphorothioate bonds (PS)
  modified_base (1)..(3): LNA nucleoside
  modified_base (13)..(16): LNA nucleoside
ctatgcatttgttaaa

SEQ ID NO: 1450 - DNA, 17 bp, Artificial Sequence
  oligonucleotide - internucleotide bonds are phosphorothioate bonds (PS)
  modified_base (1)..(4): LNA nucleoside
  modified_base (15)..(17): LNA nucleoside
actatgcatttgttaaa

SEQ ID NO: 1451 - DNA, 17 bp, Artificial Sequence
  oligonucleotide - internucleotide bonds are phosphorothioate bonds (PS)
  modified_base (1)..(3): LNA nucleoside
  modified_base (14)..(17): LNA nucleoside
actatgcatttgttaaa

SEQ ID NO: 1452 - DNA, 17 bp, Artificial Sequence
  oligonucleotide - internucleotide bonds are phosphorothioate bonds (PS)
  modified_base (1)..(4): LNA nucleoside
  modified_base (14)..(17): LNA nucleoside
actatgcatttgttaaa

SEQ ID NO: 1453 - DNA, 17 bp, Artificial Sequence
  oligonucleotide - internucleotide bonds are phosphorothioate bonds (PS)
  modified_base (1)..(4): LNA nucleoside
  modified_base (16)..(17): LNA nucleoside
ctatgcatttgttaaaa

SEQ ID NO: 1454 - DNA, 17 bp, Artificial Sequence
  oligonucleotide - internucleotide bonds are phosphorothioate bonds (PS)
  modified_base (1)..(4): LNA nucleoside
  modified_base (15)..(17): LNA nucleoside
ctatgcatttgttaaaa

SEQ ID NO: 1455 - DNA, 17 bp, Artificial Sequence
  oligonucleotide - internucleotide bonds are phosphorothioate bonds (PS)
  modified_base (1)..(4): LNA nucleoside
  modified_base (14)..(17): LNA nucleoside
ctatgcatttgttaaaa

SEQ ID NO: 1456 - DNA, 18 bp, Artificial Sequence
  oligonucleotide - internucleotide bonds are phosphorothioate bonds (PS)
  modified_base (1)..(4): LNA nucleoside
  modified_base (17)..(18): LNA nucleoside
actatgcatttgttaaaa

SEQ ID NO: 1457 - DNA, 18 bp, Artificial Sequence
  oligonucleotide - internucleotide bonds are phosphorothioate bonds (PS)
  modified_base (1)..(4): LNA nucleoside
  modified_base (16)..(18): LNA nucleoside
actatgcatttgttaaaa

SEQ ID NO: 1458 - DNA, 18 bp, Artificial Sequence
  oligonucleotide - internucleotide bonds are phosphorothioate bonds (PS)
  modified_base (1)..(4): LNA nucleoside
  modified_base (15)..(18): LNA nucleoside
actatgcatttgttaaaa

SEQ ID NO: 1459 - DNA, 17 bp, Artificial Sequence
  oligonucleotide - internucleotide bonds are phosphorothioate bonds (PS)
  modified_base (1)..(4): LNA nucleoside
  modified_base (13)..(17): LNA nucleoside
aaatggagcaattgtac

SEQ ID NO: 1460 - DNA, 17 bp, Artificial Sequence
  oligonucleotide - internucleotide bonds are phosphorothioate bonds (PS)
  modified_base (1)..(4): LNA nucleoside
  modified_base (16)..(17): LNA nucleoside
  modified_base (12)..(12): 5-methyl cytosine
actgaggaatacggaag

SEQ ID NO: 1461 - DNA, 17 bp, Artificial Sequence
  oligonucleotide - internucleotide bonds are phosphorothioate bonds (PS)
  modified_base (1)..(3): LNA nucleoside
  modified_base (14)..(17): LNA nucleoside
  modified_base (8)..(8): 5-methyl cytosine
agtttggcgacaaaatt

SEQ ID NO: 1462 - DNA, 17 bp, Artificial Sequence
  oligonucleotide - internucleotide bonds are phosphorothioate bonds (PS)
  modified_base (1)..(2): LNA nucleoside
  modified_base (16)..(17): LNA nucleoside
caggaacactagagggt

SEQ ID NO: 1463 - DNA, 17 bp, Artificial Sequence
  oligonucleotide - internucleotide bonds are phosphorothioate bonds (PS)
  modified_base (1)..(3): LNA nucleoside
  modified_base (14)..(17): LNA nucleoside
  modified_base (12)..(12): 5-methyl cytosine
catgaggaatacggaag

SEQ ID NO: 1464 - DNA, 17 bp, Artificial Sequence
  oligonucleotide - internucleotide bonds are phosphorothioate bonds (PS)
  modified_base (1)..(2): LNA nucleoside
  modified_base (15)..(17): LNA nucleoside
cctacagggaaagtgaa

SEQ ID NO: 1465 - DNA, 15 bp, Artificial Sequence
  oligonucleotide - internucleotide bonds are phosphorothioate bonds (PS)
  modified_base (1)..(3): LNA nucleoside
  modified_base (12)..(15): LNA nucleoside
ccttaagatactgtt

SEQ ID NO: 1466 - DNA, 15 bp, Artificial Sequence
  oligonucleotide - internucleotide bonds are phosphorothioate bonds (PS)
  modified_base (1)..(2): LNA nucleoside
  modified_base (14)..(15): LNA nucleoside
  modified_base (6)..(6): 5-methyl cytosine
ctgcacgtccagccc

SEQ ID NO: 1467 - DNA, 18 bp, Artificial Sequence
  oligonucleotide - internucleotide bonds are phosphorothioate bonds (PS)
  modified_base (1)..(3): LNA nucleoside
  modified_base (16)..(18): LNA nucleoside
ctttggttgattttgttg

SEQ ID NO: 1468 - DNA, 16 bp, Artificial Sequence
  oligonucleotide - internucleotide bonds are phosphorothioate bonds (PS)
  modified_base (1)..(2): LNA nucleoside
  modified_base (15)..(16): LNA nucleoside
gacagtgcatctagct

SEQ ID NO: 1469 - DNA, 17 bp, Artificial Sequence
  oligonucleotide - internucleotide bonds are phosphorothioate bonds (PS)
  modified_base (1)..(2): LNA nucleoside
  modified_base (15)..(17): LNA nucleoside
  modified_base (9)..(9): 5-methyl cytosine
gaggaatacggaagtca

SEQ ID NO: 1470 - DNA, 17 bp, Artificial Sequence
  oligonucleotide - internucleotide bonds are phosphorothioate bonds (PS)
  modified_base (1)..(2): LNA nucleoside
  modified_base (16)..(17): LNA nucleoside
gtgggttgatgagagag

SEQ ID NO: 1471 - DNA, 17 bp, Artificial Sequence
  oligonucleotide - internucleotide bonds are phosphorothioate bonds (PS)
  modified_base (1)..(2): LNA nucleoside
  modified_base (16)..(17): LNA nucleoside
  modified_base (5)..(5): 5-methyl cytosine
tctgcgaggtagatgtt

SEQ ID NO: 1472 - DNA, 17 bp, Artificial Sequence
  oligonucleotide - internucleotide bonds are phosphorothioate bonds (PS)
  modified_base (1)..(2): LNA nucleoside
  modified_base (16)..(17): LNA nucleoside
  modified_base (10)..(10): 5-methyl cytosine
tgaggaatacggaagcc

SEQ ID NO: 1473 - RNA, 20 nt, Homo Sapiens
ugaaagucaaugguaagaau

SEQ ID NO: 1474 - RNA, 17 nt, Homo Sapiens
ugaaagucaaugguaag

SEQ ID NO: 1475 - RNA, 17 nt, Homo Sapiens
ccuggcuuucgugugcu

SEQ ID NO: 1476 - RNA, 17 nt, Homo Sapiens
acagacaccaaacagcu

SEQ ID NO: 1477 - RNA, 17 nt, Homo Sapiens
cgugugcuggagaaaga

SEQ ID NO: 1478 - RNA, 17 nt, Homo Sapiens
uuucgugugcuggagaa

SEQ ID NO: 1479 - RNA, 20 nt, Homo Sapiens
gugugcuggagaaagaucaa

SEQ ID NO: 1480 - RNA, 17 nt, Homo Sapiens
ucagaaaacaaaagauc

SEQ ID NO: 1481 - RNA, 17 nt, Homo Sapiens
uuagaauauuaccucau

SEQ ID NO: 1482 - RNA, 15 nt, Homo Sapiens
cgauucugcuucuag

SEQ ID NO: 1483 - RNA, 16 nt, Homo Sapiens
cauaaauuugaccugc

SEQ ID NO: 1484 - RNA, 16 nt, Homo Sapiens
uuguaugcaaauaggc

SEQ ID NO: 1485 - RNA, 16 nt, Homo Sapiens
ucucuagucaguuccc

SEQ ID NO: 1486 - RNA, 17 nt, Homo Sapiens
uuagcccugaaacugac

SEQ ID NO: 1487 - RNA, 16 nt, Homo Sapiens
uaguauuuuggcagga

SEQ ID NO: 1488 - RNA, 19 nt, Homo Sapiens
ucuuacaacaggggucuau

SEQ ID NO: 1489 - RNA, 20 nt, Homo Sapiens
gguuugaauauaaacacuau

SEQ ID NO: 1490 - RNA, 20 nt, Homo Sapiens
cagccuuauuuuauucccau

SEQ ID NO: 1491 - RNA, 20 nt, Homo Sapiens
caggggucuaugugaaaaug

SEQ ID NO: 1492 - RNA, 20 nt, Homo Sapiens
cagagccagaaugugaaaag

SEQ ID NO: 1493 - RNA, 20 nt, Homo Sapiens
gccuuauuuuauucccauca

SEQ ID NO: 1494 - RNA, 17 nt, Homo Sapiens
gagaaugcugaguucau

SEQ ID NO: 1495 - RNA, 20 nt, Homo Sapiens
gucucucuauugguggaaau

SEQ ID NO: 1496 - RNA, 20 nt, Homo Sapiens
agauguucucuguaagucua

SEQ ID NO: 1497 - RNA, 16 nt, Homo Sapiens
augccaccauugucuu

SEQ ID NO: 1498 - RNA, 17 nt, Homo Sapiens
gaaagucaaaggugagu

SEQ ID NO: 1499 - RNA, 17 nt, Homo Sapiens
cgccugggacuacaagu

SEQ ID NO: 1500 - RNA, 19 nt, Homo Sapiens
aucaaagugacaggugggu

SEQ ID NO: 1501 - RNA, 20 nt, Homo Sapiens
gagaaugugaccaugaaggu

SEQ ID NO: 1502 - RNA, 20 nt, Homo Sapiens
gacugguuuugcuggaggau

SEQ ID NO: 1503 - RNA, 20 nt, Homo Sapiens
cugagaaugugaccaugaag

SEQ ID NO: 1504 - DNA, 20 bp, Artificial Sequence
  oligonucleotide - internucleotide bonds are phosphorothioate bonds (PS)
  modified_base (1)..(2): LNA nucleoside
  modified_base (19)..(20): LNA nucleoside
attcttaccattgactttca

SEQ ID NO: 1505 - DNA, 17 bp, Artificial Sequence
  oligonucleotide - internucleotide bonds are phosphorothioate bonds (PS)
  modified_base (1)..(4): LNA nucleoside
  modified_base (16)..(17): LNA nucleoside
cttaccattgactttca

SEQ ID NO: 1506 - DNA, 17 bp, Artificial Sequence
  oligonucleotide - internucleotide bonds are phosphorothioate bonds (PS)
  modified_base (1)..(2): LNA nucleoside
  modified_base (16)..(17): LNA nucleoside
  modified_base (7)..(7): 5-methyl cytosine
agcacacgaaagccagg

SEQ ID NO: 1507 - DNA, 17 bp, Artificial Sequence
  oligonucleotide - internucleotide bonds are phosphorothioate bonds (PS)
  modified_base (1)..(2): LNA nucleoside
  modified_base (16)..(17): LNA nucleoside
agctgtttggtgtctgt

SEQ ID NO: 1508 - DNA, 17 bp, Artificial Sequence
  oligonucleotide - internucleotide bonds are phosphorothioate bonds (PS)
  modified_base (1)..(3): LNA nucleoside
  modified_base (15)..(17): LNA nucleoside
tctttctccagcacacg

SEQ ID NO: 1509 - DNA, 17 bp, Artificial Sequence
  oligonucleotide - internucleotide bonds are phosphorothioate bonds (PS)
  modified_base (1)..(3): LNA nucleoside
  modified_base (14)..(17): LNA nucleoside
  modified_base (13)..(13): 5-methyl cytosine
ttctccagcacacgaaa

SEQ ID NO: 1510 - DNA, 20 bp, Artificial Sequence
  oligonucleotide - internucleotide bonds are phosphorothioate bonds (PS)
  modified_base (1)..(2): LNA nucleoside
  modified_base (19)..(20): LNA nucleoside
ttgatctttctccagcacac

SEQ ID NO: 1511 - DNA, 17 bp, Artificial Sequence
  oligonucleotide - internucleotide bonds are phosphorothioate bonds (PS)
  modified_base (1)..(4): LNA nucleoside
  modified_base (16)..(17): LNA nucleoside
gatcttttgttttctga

SEQ ID NO: 1512 - DNA, 17 bp, Artificial Sequence
  oligonucleotide - internucleotide bonds are phosphorothioate bonds (PS)
  modified_base (1)..(4): LNA nucleoside
  modified_base (14)..(17): LNA nucleoside
atgaggtaatattctaa

SEQ ID NO: 1513 - DNA, 15 bp, Artificial Sequence
  oligonucleotide - internucleotide bonds are phosphorothioate bonds (PS)
  modified_base (1)..(4): LNA nucleoside
  modified_base (12)..(15): LNA nucleoside
ctagaagcagaatcg

SEQ ID NO: 1514 - DNA, 16 bp, Artificial Sequence
  oligonucleotide - internucleotide bonds are phosphorothioate bonds (PS)
  modified_base (1)..(3): LNA nucleoside
  modified_base (14)..(16): LNA nucleoside
gcaggtcaaatttatg

SEQ ID NO: 1515 - DNA, 16 bp, Artificial Sequence
  oligonucleotide - internucleotide bonds are phosphorothioate bonds (PS)
  modified_base (1)..(2): LNA nucleoside
  modified_base (14)..(16): LNA nucleoside
gcctatttgcatacaa

SEQ ID NO: 1516 - DNA, 16 bp, Artificial Sequence
  oligonucleotide - internucleotide bonds are phosphorothioate bonds (PS)
  modified_base (1)..(2): LNA nucleoside
  modified_base (13)..(16): LNA nucleoside
gggaactgactagaga

SEQ ID NO: 1517 - DNA, 17 bp, Artificial Sequence
  oligonucleotide - internucleotide bonds are phosphorothioate bonds (PS)
  modified_base (1)..(2): LNA nucleoside
  modified_base (15)..(17): LNA nucleoside
gtcagtttcagggctaa

SEQ ID NO: 1518 - DNA, 16 bp, Artificial Sequence
  oligonucleotide - internucleotide bonds are phosphorothioate bonds (PS)
  modified_base (1)..(4): LNA nucleoside
  modified_base (14)..(16): LNA nucleoside
tcctgccaaaatacta

SEQ ID NO: 1519 - DNA, 19 bp, Artificial Sequence
  oligonucleotide - internucleotide bonds are phosphorothioate bonds (PS)
  modified_base (1)..(2): LNA nucleoside
  modified_base (18)..(19): LNA nucleoside
atagacccctgttgtaaga

SEQ ID NO: 1520 - DNA, 20 bp, Artificial Sequence
  oligonucleotide - internucleotide bonds are phosphorothioate bonds (PS)
  modified_base (1)..(3): LNA nucleoside
  modified_base (17)..(20): LNA nucleoside
atagtgtttatattcaaacc

SEQ ID NO: 1521 - DNA, 20 bp, Artificial Sequence
  oligonucleotide - internucleotide bonds are phosphorothioate bonds (PS)
  modified_base (1)..(4): LNA nucleoside
  modified_base (19)..(20): LNA nucleoside
atgggaataaaataaggctg

SEQ ID NO: 1522 - DNA, 20 bp, Artificial Sequence
  oligonucleotide - internucleotide bonds are phosphorothioate bonds (PS)
  modified_base (1)..(2): LNA nucleoside
  modified_base (19)..(20): LNA nucleoside
cattttcacatagacccctg

SEQ ID NO: 1523 - DNA, 20 bp, Artificial Sequence
  oligonucleotide - internucleotide bonds are phosphorothioate bonds (PS)
  modified_base (1)..(2): LNA nucleoside
  modified_base (19)..(20): LNA nucleoside
cttttcacattctggctctg

SEQ ID NO: 1524 - DNA, 20 bp, Artificial Sequence
  oligonucleotide - internucleotide bonds are phosphorothioate bonds (PS)
  modified_base (1)..(2): LNA nucleoside
  modified_base (18)..(20): LNA nucleoside
tgatgggaataaaataaggc

SEQ ID NO: 1525 - DNA, 17 bp, Artificial Sequence
  oligonucleotide - internucleotide bonds are phosphorothioate bonds (PS)
  modified_base (1)..(2): LNA nucleoside
  modified_base (14)..(17): LNA nucleoside
atgaactcagcattctc

SEQ ID NO: 1526 - DNA, 20 bp, Artificial Sequence
  oligonucleotide - internucleotide bonds are phosphorothioate bonds (PS)
  modified_base (1)..(3): LNA nucleoside
  modified_base (19)..(20): LNA nucleoside
atttccaccaatagagagac

SEQ ID NO: 1527 - DNA, 20 bp, Artificial Sequence
  oligonucleotide - internucleotide bonds are phosphorothioate bonds (PS)
  modified_base (1)..(3): LNA nucleoside
  modified_base (18)..(20): LNA nucleoside
tagacttacagagaacatct

SEQ ID NO: 1528 - DNA, 16 bp, Artificial Sequence
  oligonucleotide - internucleotide bonds are phosphorothioate bonds (PS)
  modified_base (1)..(3): LNA nucleoside
  modified_base (13)..(16): LNA nucleoside
aagacaatggtggcat

SEQ ID NO: 1529 - DNA, 17 bp, Artificial Sequence
  oligonucleotide - internucleotide bonds are phosphorothioate bonds (PS)
  modified_base (1)..(4): LNA nucleoside
  modified_base (16)..(17): LNA nucleoside
actcacctttgactttc

SEQ ID NO: 1530 - DNA, 17 bp, Artificial Sequence
  oligonucleotide - internucleotide bonds are phosphorothioate bonds (PS)
  modified_base (1)..(2): LNA nucleoside
  modified_base (16)..(17): LNA nucleoside
acttgtagtcccaggcg

SEQ ID NO: 1531 - DNA, 19 bp, Artificial Sequence
  oligonucleotide - internucleotide bonds are phosphorothioate bonds (PS)
  modified_base (1)..(2): LNA nucleoside
  modified_base (18)..(19): LNA nucleoside
acccacctgtcactttgat

SEQ ID NO: 1532 - DNA, 20 bp, Artificial Sequence
  oligonucleotide - internucleotide bonds are phosphorothioate bonds (PS)
  modified_base (1)..(2): LNA nucleoside
  modified_base (19)..(20): LNA nucleoside
accttcatggtcacattctc

SEQ ID NO: 1533 - DNA, 20 bp, Artificial Sequence
  oligonucleotide - internucleotide bonds are phosphorothioate bonds (PS)
  modified_base (1)..(2): LNA nucleoside
  modified_base (19)..(20): LNA nucleoside
atcctccagcaaaaccagtc

SEQ ID NO: 1534 - DNA, 20 bp, Artificial Sequence
  oligonucleotide - internucleotide bonds are phosphorothioate bonds (PS)
  modified_base (1)..(2): LNA nucleoside
  modified_base (19)..(20): LNA nucleoside
cttcatggtcacattctcag

SEQ ID NO: 1535 - RNA, 17 nt, Homo Sapiens
gccguuuuguauuaacu

SEQ ID NO: 1536 - RNA, 17 nt, Homo Sapiens
cgaccagauaaagugau

SEQ ID NO: 1537 - RNA, 17 nt, Homo Sapiens
uuaucacuaucacuucg

SEQ ID NO: 1538 - RNA, 17 nt, Homo Sapiens
acguaucuuaauccuga

SEQ ID NO: 1539 - RNA, 17 nt, Homo Sapiens
cggggugaauagguguu

SEQ ID NO: 1540 - RNA, 17 nt, Homo Sapiens
caaauacgacagaggcu

SEQ ID NO: 1541 - RNA, 17 nt, Homo Sapiens
guacgauucuucaucuc

SEQ ID NO: 1542 - RNA, 17 nt, Homo Sapiens
gccucguccauucccac

SEQ ID NO: 1543 - RNA, 17 nt, Homo Sapiens
gaccacccacaaccuua

SEQ ID NO: 1544 - RNA, 17 nt, Homo Sapiens
gagcauagguaaucgua

SEQ ID NO: 1545 - RNA, 17 nt, Homo Sapiens
cccaucuacgucccuca

SEQ ID NO: 1546 - RNA, 17 nt, Homo Sapiens
acccacuaccucaccuu

SEQ ID NO: 1547 - RNA, 16 nt, Homo Sapiens
gaaaacggagugcaac

SEQ ID NO: 1548 - RNA, 16 nt, Homo Sapiens
auuacuacacccgcca

SEQ ID NO: 1549 - RNA, 16 nt, Homo Sapiens
guggacggagauuagu

SEQ ID NO: 1550 - RNA, 17 nt, Homo Sapiens
cgaagauggauaggaac

SEQ ID NO: 1551 - RNA, 17 nt, Homo Sapiens
augguaauaugucguaa

SEQ ID NO: 1552 - RNA, 17 nt, Homo Sapiens
ugaagaccugaacaccg

SEQ ID NO: 1553 - RNA, 17 nt, Homo Sapiens
acaccgcucccauaaag

SEQ ID NO: 1554 - RNA, 17 nt, Homo Sapiens
cccaacgaaaagcacau

SEQ ID NO: 1555 - RNA, 16 nt, Homo Sapiens
acgcccaccuguuaau

SEQ ID NO: 1556 - RNA, 17 nt, Homo Sapiens
cucgaauuugccucuga

SEQ ID NO: 1557 - RNA, 17 nt, Homo Sapiens
guugacgggauaauaga

SEQ ID NO: 1558 - RNA, 16 nt, Homo Sapiens
agguagacgggcgagu

SEQ ID NO: 1559 - RNA, 17 nt, Homo Sapiens
cgucguucaguggggau

SEQ ID NO: 1560 - RNA, 16 nt, Homo Sapiens
cuuaaacuaacgcagg

SEQ ID NO: 1561 - RNA, 17 nt, Homo Sapiens
cgguggauaaagguuca

SEQ ID NO: 1562 - RNA, 17 nt, Homo Sapiens
cuggugguuggugucgu

SEQ ID NO: 1563 - RNA, 17 nt, Homo Sapiens
guucgagugaggacagu

SEQ ID NO: 1564 - RNA, 17 nt, Homo Sapiens
guccuguaaugcggucu

SEQ ID NO: 1565 - RNA, 17 nt, Homo Sapiens
gucugggcggugcuaca

SEQ ID NO: 1566 - RNA, 16 nt, Homo Sapiens
cggaaacgaagaguau

SEQ ID NO: 1567 - RNA, 16 nt, Homo Sapiens
gucguucguuauaugg

SEQ ID NO: 1568 - RNA, 16 nt, Homo Sapiens
agguuacuccacuucg

SEQ ID NO: 1569 - RNA, 16 nt, Homo Sapiens
ccgcugugagaccauu

SEQ ID NO: 1570 - RNA, 16 nt, Homo Sapiens
cggucggcaagguugu

SEQ ID NO: 1571 - RNA, 16 nt, Homo Sapiens
gcggcagguuaucgug

SEQ ID NO: 1572 - RNA, 16 nt, Homo Sapiens
cguaggucgucauagg

SEQ ID NO: 1573 - RNA, 16 nt, Homo Sapiens
uuacgaggcaugauag

SEQ ID NO: 1574 - RNA, 16 nt, Homo Sapiens
ugugucccguaucgcc

SEQ ID NO: 1575 - RNA, 16 nt, Homo Sapiens
gcgaugcgacuaugac

SEQ ID NO: 1576 - RNA, 16 nt, Homo Sapiens
gagacuacgagaguaa

SEQ ID NO: 1577 - RNA, 16 nt, Homo Sapiens
guugccugaccuacgu

SEQ ID NO: 1578 - RNA, 18 nt, Homo Sapiens
augacguuugaucuguac

SEQ ID NO: 1579 - RNA, 16 nt, Homo Sapiens
aaaguguaccuguucg

SEQ ID NO: 1580 - RNA, 18 nt, Homo Sapiens
uucgugcuaaacugguac

SEQ ID NO: 1581 - RNA, 18 nt, Homo Sapiens
aucacucuccagauacac

SEQ ID NO: 1582 - RNA, 19 nt, Homo Sapiens
aucacucuccagauacaca

SEQ ID NO: 1583 - RNA, 20 nt, Homo Sapiens
aaagucaaugguaagaauua

SEQ ID NO: 1584 - RNA, 18 nt, Homo Sapiens
guguggguucaaacacau

SEQ ID NO: 1585 - RNA, 18 nt, Homo Sapiens
ucuguguggguucaaaca

SEQ ID NO: 1586 - RNA, 17 nt, Homo Sapiens
caguccgugaguuuguc

SEQ ID NO: 1587 - RNA, 17 nt, Homo Sapiens
gucucucuauuggugga

SEQ ID NO: 1588 - RNA, 17 nt, Homo Sapiens
uaugccaccauugucuu

SEQ ID NO: 1589 - RNA, 18 nt, Homo Sapiens
caccuucaccugcagcuu

SEQ ID NO: 1590 - RNA, 17 nt, Homo Sapiens
gucaccaguguucugcg

SEQ ID NO: 1591 - RNA, 18 nt, Homo Sapiens
gaaagucaaaggugagug

SEQ ID NO: 1592 - RNA, 16 nt, Homo Sapiens
agagggcaggacauuu

SEQ ID NO: 1593 - RNA, 16 nt, Homo Sapiens
agagggcaggacauuu

SEQ ID NO: 1594 - DNA, 17 bp, Artificial Sequence
  oligonucleotide - internucleotide bonds are phosphorothioate bonds (PS)
  modified_base (1)..(4): LNA nucleoside
  modified_base (14)..(17): LNA nucleoside
agttaatacaaaacggc

SEQ ID NO: 1595 - DNA, 17 bp, Artificial Sequence
  oligonucleotide - internucleotide bonds are phosphorothioate bonds (PS)
  modified_base (1)..(2): LNA nucleoside
  modified_base (14)..(17): LNA nucleoside
atcactttatctggtcg

SEQ ID NO: 1596 - DNA, 17 bp, Artificial Sequence
  oligonucleotide - internucleotide bonds are phosphorothioate bonds (PS)
  modified_base (1)..(4): LNA nucleoside
  modified_base (14)..(17): LNA nucleoside
cgaagtgatagtgataa

SEQ ID NO: 1597 - DNA, 17 bp, Artificial Sequence
  oligonucleotide - internucleotide bonds are phosphorothioate bonds (PS)
  modified_base (1)..(3): LNA nucleoside
  modified_base (15)..(17): LNA nucleoside
tcaggattaagatacgt

SEQ ID NO: 1598 - DNA, 17 bp, Artificial Sequence
  oligonucleotide - internucleotide bonds are phosphorothioate bonds (PS)
  modified_base (1)..(2): LNA nucleoside
  modified_base (15)..(17): LNA nucleoside
aacacctattcaccccg

SEQ ID NO: 1599 - DNA, 17 bp, Artificial Sequence
  oligonucleotide - internucleotide bonds are phosphorothioate bonds (PS)
  modified_base (1)..(2): LNA nucleoside
  modified_base (16)..(17): LNA nucleoside
  modified_base (10)..(10): 5-methyl cytosine
agcctctgtcgtatttg

SEQ ID NO: 1600 - DNA, 17 bp, Artificial Sequence
  oligonucleotide - internucleotide bonds are phosphorothioate bonds (PS)
  modified_base (1)..(3): LNA nucleoside
  modified_base (14)..(17): LNA nucleoside
  modified_base (13)..(13): 5-methyl cytosine
gagatgaagaatcgtac

SEQ ID NO: 1601 - DNA, 17 bp, Artificial Sequence
  oligonucleotide - internucleotide bonds are phosphorothioate bonds (PS)
  modified_base (1)..(2): LNA nucleoside
  modified_base (16)..(17): LNA nucleoside
  modified_base (12)..(12): 5-methyl cytosine
gtgggaatggacgaggc

SEQ ID NO: 1602 - DNA, 17 bp, Artificial Sequence
  oligonucleotide - internucleotide bonds are phosphorothioate bonds (PS)
  modified_base (1)..(2): LNA nucleoside
  modified_base (16)..(17): LNA nucleoside
taaggttgtgggtggtc

SEQ ID NO: 1603 - DNA, 17 bp, Artificial Sequence
  oligonucleotide - internucleotide bonds are phosphorothioate bonds (PS)
  modified_base (1)..(2): LNA nucleoside
  modified_base (15)..(17): LNA nucleoside
  modified_base (3)..(3): 5-methyl cytosine
tacgattacctatgctc

SEQ ID NO: 1604 - DNA, 17 bp, Artificial Sequence
  oligonucleotide - internucleotide bonds are phosphorothioate bonds (PS)
  modified_base (1)..(2): LNA nucleoside
  modified_base (15)..(17): LNA nucleoside
  modified_base (8)..(8): 5-methyl cytosine
tgagggacgtagatggg

SEQ ID NO: 1605 - DNA, 17 bp, Artificial Sequence
  oligonucleotide - internucleotide bonds are phosphorothioate bonds (PS)
  modified_base (1)..(2): LNA nucleoside
  modified_base (16)..(17): LNA nucleoside
aaggtgaggtagtgggt

SEQ ID NO: 1606 - DNA, 16 bp, Artificial Sequence
  oligonucleotide - internucleotide bonds are phosphorothioate bonds (PS)
  modified_base (1)..(2): LNA nucleoside
  modified_base (14)..(16): LNA nucleoside
  modified_base (10)..(10): 5-methyl cytosine
gttgcactccgttttc

SEQ ID NO: 1607 - DNA, 16 bp, Artificial Sequence
  oligonucleotide - internucleotide bonds are phosphorothioate bonds (PS)
  modified_base (1)..(2): LNA nucleoside
  modified_base (13)..(16): LNA nucleoside
  modified_base (4)..(4): 5-methyl cytosine
tggcgggtgtagtaat

SEQ ID NO: 1608 - DNA, 16 bp, Artificial Sequence
  oligonucleotide - internucleotide bonds are phosphorothioate bonds (PS)
  modified_base (1)..(2): LNA nucleoside
  modified_base (14)..(16): LNA nucleoside
  modified_base (10)..(10): 5-methyl cytosine
actaatctccgtccac

SEQ ID NO: 1609 - DNA, 17 bp, Artificial Sequence
  oligonucleotide - internucleotide bonds are phosphorothioate bonds (PS)
  modified_base (1)..(2): LNA nucleoside
  modified_base (16)..(17): LNA nucleoside
gttcctatccatcttcg

SEQ ID NO: 1610 - DNA, 17 bp, Artificial Sequence
  oligonucleotide - internucleotide bonds are phosphorothioate bonds (PS)
  modified_base (1)..(4): LNA nucleoside
  modified_base (14)..(17): LNA nucleoside
ttacgacatattaccat

SEQ ID NO: 1611 - DNA, 17 bp, Artificial Sequence
  oligonucleotide - internucleotide bonds are phosphorothioate bonds (PS)
  modified_base (1)..(2): LNA nucleoside
  modified_base (16)..(17): LNA nucleoside
cggtgttcaggtcttca

SEQ ID NO: 1612 - DNA, 17 bp, Artificial Sequence
  oligonucleotide - internucleotide bonds are phosphorothioate bonds (PS)
  modified_base (1)..(2): LNA nucleoside
  modified_base (15)..(17): LNA nucleoside
  modified_base (12)..(12): 5-methyl cytosine
ctttatgggagcggtgt

SEQ ID NO: 1613 - DNA, 17 bp, Artificial Sequence
  oligonucleotide - internucleotide bonds are phosphorothioate bonds (PS)
  modified_base (1)..(3): LNA nucleoside
  modified_base (16)..(17): LNA nucleoside
  modified_base (11)..(11): 5-methyl cytosine
atgtgcttttcgttggg

SEQ ID NO: 1614 - DNA, 16 bp, Artificial Sequence
  oligonucleotide - internucleotide bonds are phosphorothioate bonds (PS)
  modified_base (1)..(2): LNA nucleoside
  modified_base (14)..(16): LNA nucleoside
attaacaggtgggcgt

SEQ ID NO: 1615 - DNA, 17 bp, Artificial Sequence
  oligonucleotide - internucleotide bonds are phosphorothioate bonds (PS)
  modified_base (1)..(2): LNA nucleoside
  modified_base (14)..(17): LNA nucleoside
tcagaggcaaattcgag

SEQ ID NO: 1616 - DNA, 17 bp, Artificial Sequence
  oligonucleotide - internucleotide bonds are phosphorothioate bonds (PS)
  modified_base (1)..(3): LNA nucleoside
  modified_base (16)..(17): LNA nucleoside
  modified_base (11)..(11): 5-methyl cytosine
tctattatcccgtcaac

SEQ ID NO: 1617 - DNA, 16 bp, Artificial Sequence
  oligonucleotide - internucleotide bonds are phosphorothioate bonds (PS)
  modified_base (1)..(2): LNA nucleoside
  modified_base (15)..(16): LNA nucleoside
  modified_base (4)..(4): 5-methyl cytosine
  modified_base (8)..(8): 5-methyl cytosine
actcgcccgtctacct

SEQ ID NO: 1618 - DNA, 17 bp, Artificial Sequence
  oligonucleotide - internucleotide bonds are phosphorothioate bonds (PS)
  modified_base (1)..(4): LNA nucleoside
  modified_base (16)..(17): LNA nucleoside
  modified_base (13)..(13): 5-methyl cytosine
atccccactgaacgacg

SEQ ID NO: 1619 - DNA, 16 bp, Artificial Sequence
  oligonucleotide - internucleotide bonds are phosphorothioate bonds (PS)
  modified_base (1)..(3): LNA nucleoside
  modified_base (15)..(16): LNA nucleoside
  modified_base (5)..(5): 5-methyl cytosine
cctgcgttagtttaag

SEQ ID NO: 1620 - DNA, 17 bp, Artificial Sequence
  oligonucleotide - internucleotide bonds are phosphorothioate bonds (PS)
  modified_base (1)..(3): LNA nucleoside
  modified_base (16)..(17): LNA nucleoside
tgaacctttatccaccg

SEQ ID NO: 1621 - DNA, 17 bp, Artificial Sequence
  oligonucleotide - internucleotide bonds are phosphorothioate bonds (PS)
  modified_base (1)..(3): LNA nucleoside
  modified_base (16)..(17): LNA nucleoside
acgacaccaaccaccag

SEQ ID NO: 1622 - DNA, 17 bp, Artificial Sequence
  oligonucleotide - internucleotide bonds are phosphorothioate bonds (PS)
  modified_base (1)..(3): LNA nucleoside
  modified_base (16)..(17): LNA nucleoside
  modified_base (13)..(13): 5-methyl cytosine
actgtcctcactcgaac

SEQ ID NO: 1623 - DNA, 17 bp, Artificial Sequence
  oligonucleotide - internucleotide bonds are phosphorothioate bonds (PS)
  modified_base (1)..(3): LNA nucleoside
  modified_base (16)..(17): LNA nucleoside
  modified_base (5)..(5): 5-methyl cytosine
agaccgcattacaggac

SEQ ID NO: 1624 - DNA, 17 bp, Artificial Sequence
  oligonucleotide - internucleotide bonds are phosphorothioate bonds (PS)
  modified_base (1)..(2): LNA nucleoside
  modified_base (16)..(17): LNA nucleoside
  modified_base (9)..(9): 5-methyl cytosine
tgtagcaccgcccagac

SEQ ID NO: 1625 - DNA, 16 bp, Artificial Sequence
  oligonucleotide - internucleotide bonds are phosphorothioate bonds (PS)
  modified_base (1)..(3): LNA nucleoside
  modified_base (15)..(16): LNA nucleoside
  modified_base (9)..(9): 5-methyl cytosine
atactcttcgtttccg

SEQ ID NO: 1626 - DNA, 16 bp, Artificial Sequence
  oligonucleotide - internucleotide bonds are phosphorothioate bonds (PS)
  modified_base (1)..(3): LNA nucleoside
  modified_base (13)..(16): LNA nucleoside
  modified_base (9)..(9): 5-methyl cytosine
ccatataacgaacgac

SEQ ID NO: 1627 - DNA, 16 bp, Artificial Sequence
  oligonucleotide - internucleotide bonds are phosphorothioate bonds (PS)
  modified_base (1)..(3): LNA nucleoside
  modified_base (14)..(16): LNA nucleoside
cgaagtggagtaacct

SEQ ID NO: 1628 - DNA, 16 bp, Artificial Sequence
  oligonucleotide - internucleotide bonds are phosphorothioate bonds (PS)
  modified_base (1)..(2): LNA nucleoside
  modified_base (14)..(16): LNA nucleoside
aatggtctcacagcgg

SEQ ID NO: 1629 - DNA, 16 bp, Artificial Sequence
  oligonucleotide - internucleotide bonds are phosphorothioate bonds (PS)
  modified_base (1)..(4): LNA nucleoside
  modified_base (15)..(16): LNA nucleoside
  modified_base (11)..(11): 5-methyl cytosine
acaaccttgccgaccg

SEQ ID NO: 1630 - DNA, 16 bp, Artificial Sequence
  oligonucleotide - internucleotide bonds are phosphorothioate bonds (PS)
  modified_base (1)..(3): LNA nucleoside
  modified_base (15)..(16): LNA nucleoside
  modified_base (14)..(14): 5-methyl cytosine
cacgataacctgccgc

SEQ ID NO: 1631 - DNA, 16 bp, Artificial Sequence
  oligonucleotide - internucleotide bonds are phosphorothioate bonds (PS)
  modified_base (1)..(2): LNA nucleoside
  modified_base (14)..(16): LNA nucleoside
  modified_base (8)..(8): 5-methyl cytosine
cctatgacgacctacg

SEQ ID NO: 1632 - DNA, 16 bp, Artificial Sequence
  oligonucleotide - internucleotide bonds are phosphorothioate bonds (PS)
  modified_base (1)..(3): LNA nucleoside
  modified_base (14)..(16): LNA nucleoside
  modified_base (12)..(12): 5-methyl cytosine
ctatcatgcctcgtaa

SEQ ID NO: 1633 - DNA, 16 bp, Artificial Sequence
  oligonucleotide - internucleotide bonds are phosphorothioate bonds (PS)
  modified_base (1)..(2): LNA nucleoside
  modified_base (15)..(16): LNA nucleoside
  modified_base (3)..(3): 5-methyl cytosine
  modified_base (8)..(8): 5-methyl cytosine
ggcgatacgggacaca

SEQ ID NO: 1634 - DNA, 16 bp, Artificial Sequence
  oligonucleotide - internucleotide bonds are phosphorothioate bonds (PS)
  modified_base (1)..(2): LNA nucleoside
  modified_base (15)..(16): LNA nucleoside
  modified_base (9)..(9): 5-methyl cytosine
  modified_base (14)..(14): 5-methyl cytosine
gtcatagtcgcatcgc

SEQ ID NO: 1635 - DNA, 16 bp, Artificial Sequence
  oligonucleotide - internucleotide bonds are phosphorothioate bonds (PS)
  modified_base (1)..(3): LNA nucleoside
  modified_base (14)..(16): LNA nucleoside
  modified_base (8)..(8): 5-methyl cytosine
ttactctcgtagtctc

SEQ ID NO: 1636 - DNA, 16 bp, Artificial Sequence
  oligonucleotide - internucleotide bonds are phosphorothioate bonds (PS)
  modified_base (1)..(4): LNA nucleoside
  modified_base (14)..(16): LNA nucleoside
acgtaggtcaggcaac

SEQ ID NO: 1637 - DNA, 18 bp, Artificial Sequence
  oligonucleotide - internucleotide bonds are phosphorothioate bonds (PS)
  modified_base (1)..(4): LNA nucleoside
  modified_base (16)..(18): LNA nucleoside
  modified_base (13)..(13): 5-methyl cytosine
gtacagatcaaacgtcat

SEQ ID NO: 1638 - DNA, 16 bp, Artificial Sequence
  oligonucleotide - internucleotide bonds are phosphorothioate bonds (PS)
  modified_base (1)..(4): LNA nucleoside
  modified_base (13)..(16): LNA nucleoside
cgaacaggtacacttt

SEQ ID NO: 1639 - DNA, 18 bp, Artificial Sequence
  oligonucleotide - internucleotide bonds are phosphorothioate bonds (PS)
  modified_base (1)..(4): LNA nucleoside
  modified_base (16)..(18): LNA nucleoside
  modified_base (15)..(15): 5-methyl cytosine
gtaccagtttagcacgaa

SEQ ID NO: 1640 - DNA, 18 bp, Artificial Sequence
  oligonucleotide - internucleotide bonds are phosphorothioate bonds (PS)
  modified_base (1)..(2): LNA nucleoside
  modified_base (16)..(18): LNA nucleoside
gtgtatctggagagtgat

SEQ ID NO: 1641 - DNA, 19 bp, Artificial Sequence
  oligonucleotide - internucleotide bonds are phosphorothioate bonds (PS)
  modified_base (1)..(2): LNA nucleoside
  modified_base (18)..(19): LNA nucleoside
tgtgtatctggagagtgat

SEQ ID NO: 1642 - DNA, 20 bp, Artificial Sequence
  oligonucleotide - internucleotide bonds are phosphorothioate bonds (PS)
  modified_base (1)..(3): LNA nucleoside
  modified_base (17)..(20): LNA nucleoside
taattcttaccattgacttt

SEQ ID NO: 1643 - DNA, 18 bp, Artificial Sequence
  oligonucleotide - internucleotide bonds are phosphorothioate bonds (PS)
  modified_base (1)..(2): LNA nucleoside
  modified_base (17)..(18): LNA nucleoside
atgtgtttgaacccacac

SEQ ID NO: 1644 - DNA, 18 bp, Artificial Sequence
  oligonucleotide - internucleotide bonds are phosphorothioate bonds (PS)
  modified_base (1)..(2): LNA nucleoside
  modified_base (17)..(18): LNA nucleoside
tgtttgaacccacacaga

SEQ ID NO: 1645 - DNA, 17 bp, Artificial Sequence
  oligonucleotide - internucleotide bonds are phosphorothioate bonds (PS)
  modified_base (1)..(4): LNA nucleoside
  modified_base (16)..(17): LNA nucleoside
  modified_base (11)..(11): 5-methyl cytosine
gacaaactcacggactg

SEQ ID NO: 1646 - DNA, 17 bp, Artificial Sequence
  oligonucleotide - internucleotide bonds are phosphorothioate bonds (PS)
  modified_base (1)..(2): LNA nucleoside
  modified_base (14)..(17): LNA nucleoside
tccaccaatagagagac

SEQ ID NO: 1647 - DNA, 17 bp, Artificial Sequence
  oligonucleotide - internucleotide bonds are phosphorothioate bonds (PS)
  modified_base (1)..(2): LNA nucleoside
  modified_base (14)..(17): LNA nucleoside
aagacaatggtggcata

SEQ ID NO: 1648 - DNA, 18 bp, Artificial Sequence
  oligonucleotide - internucleotide bonds are phosphorothioate bonds (PS)
  modified_base (1)..(2): LNA nucleoside
  modified_base (17)..(18): LNA nucleoside
aagctgcaggtgaaggtg

SEQ ID NO: 1649 - DNA, 17 bp, Artificial Sequence
  oligonucleotide - internucleotide bonds are phosphorothioate bonds (PS)
  modified_base (1)..(2): LNA nucleoside
  modified_base (15)..(17): LNA nucleoside
cgcagaacactggtgac

SEQ ID NO: 1650 - DNA, 18 bp, Artificial Sequence
  oligonucleotide - internucleotide bonds are phosphorothioate bonds (PS)
  modified_base (1)..(2): LNA nucleoside
  modified_base (17)..(18): LNA nucleoside
cactcacctttgactttc

SEQ ID NO: 1651 - DNA, 16 bp, Artificial Sequence
  oligonucleotide - internucleotide bonds are phosphorothioate bonds (PS)
  modified_base (1)..(3): LNA nucleoside
  modified_base (15)..(16): LNA nucleoside
aaatgtcctgccctct

SEQ ID NO: 1652 - DNA, 16 bp, Artificial Sequence
  oligonucleotide - internucleotide bonds are phosphorothioate bonds (PS)
  modified_base (1)..(2): LNA nucleoside
  modified_base (6)..(6): LNA nucleoside
  modified_base (15)..(16): LNA nucleoside
aaatgtcctgccctct

SEQ ID NO: 1653 - DNA, 16 bp, Artificial Sequence
  oligonucleotide - internucleotide bonds are phosphorothioate bonds (PS)
  modified_base (1)..(3): LNA nucleoside
  modified_base (15)..(16): LNA nucleoside
tccgctatgaatactc

SEQ ID NO: 1654 - RNA, 16 nt, Homo Sapiens
gaguauucauagcgga

SEQ ID NO: 1655 - RNA, 18 nt, Homo Sapiens
aaaaagaaaaggaaaggg

SEQ ID NO: 1656 - RNA, 17 nt, Homo Sapiens
aaaaucaaggugacagc

SEQ ID NO: 1657 - RNA, 15 nt, Homo Sapiens
aaagcccucagaauc

SEQ ID NO: 1658 - RNA, 16 nt, Homo Sapiens
aaagcccucagaaucc

SEQ ID NO: 1659 - RNA, 15 nt, Homo Sapiens
aaaggauguaucagu

SEQ ID NO: 1660 - RNA, 16 nt, Homo Sapiens
aaaggauguaucaguu

SEQ ID NO: 1661 - RNA, 15 nt, Homo Sapiens
aaagugagugaagug

SEQ ID NO: 1662 - RNA, 16 nt, Homo Sapiens
aaagugagugaagugg

SEQ ID NO: 1663 - RNA, 14 nt, Homo Sapiens
aaccugcagcaggu

SEQ ID NO: 1664 - RNA, 15 nt, Homo Sapiens
aagaaaacaacucug

SEQ ID NO: 1665 - RNA, 14 nt, Homo Sapiens
aagcccucagaauc

SEQ ID NO: 1666 - RNA, 15 nt, Homo Sapiens
aagcccucagaaucc

SEQ ID NO: 1667 - RNA, 16 nt, Homo Sapiens
aaggaagaggcucugc

SEQ ID NO: 1668 - RNA, 14 nt, Homo Sapiens
aaggauguaucagu

SEQ ID NO: 1669 - RNA, 15 nt, Homo Sapiens
aaggauguaucaguu

SEQ ID NO: 1670 - RNA, 15 nt, Homo Sapiens
aaggggcagaggugu

SEQ ID NO: 1671 - RNA, 15 nt, Homo Sapiens
aaggggcccaggacc

SEQ ID NO: 1672 - RNA, 16 nt, Homo Sapiens
aaggggcccaggacca

SEQ ID NO: 1673 - RNA, 17 nt, Homo Sapiens
aaggggcccaggaccac

SEQ ID NO: 1674 - RNA, 15 nt, Homo Sapiens
aagugagugaagugg

SEQ ID NO: 1675 - RNA, 16 nt, Homo Sapiens
aauaacaaagaauuau

SEQ ID NO: 1676 - RNA, 16 nt, Homo Sapiens
aauauguguaaugaau

SEQ ID NO: 1677 - RNA, 15 nt, Homo Sapiens
aaucuuuucccugga

SEQ ID NO: 1678 - RNA, 16 nt, Homo Sapiens
aaucuuuucccuggaa

SEQ ID NO: 1679 - RNA, 14 nt, Homo Sapiens
aaugauaaaguuac

SEQ ID NO: 1680 - RNA, 15 nt, Homo Sapiens
aauucauaaaaauac

SEQ ID NO: 1681 - RNA, 14 nt, Homo Sapiens
acauaggagcaugg

SEQ ID NO: 1682 - RNA, 15 nt, Homo Sapiens
acauaggagcauggc

SEQ ID NO: 1683 - RNA, 16 nt, Homo Sapiens
acauaggagcauggca

SEQ ID NO: 1684 - RNA, 14 nt, Homo Sapiens
accagcaacugaag

SEQ ID NO: 1685 - RNA, 14 nt, Homo Sapiens
accaguccaaggcc

SEQ ID NO: 1686 - RNA, 15 nt, Homo Sapiens
agaaaugacuuugaa

SEQ ID NO: 1687 - RNA, 15 nt, Homo Sapiens
agaacaugcauuuug

SEQ ID NO: 1688 - RNA, 16 nt, Homo Sapiens
agaacaugcauuuugg

SEQ ID NO: 1689 - RNA, 14 nt, Homo Sapiens
agacacacggauga

SEQ ID NO: 1690 - RNA, 14 nt, Homo Sapiens
agacggcacaggcc

SEQ ID NO: 1691 - RNA, 15 nt, Homo Sapiens
agacggcacaggcca

SEQ ID NO: 1692 - RNA, 17 nt, Homo Sapiens
agagaaaaggaagaaag

SEQ ID NO: 1693 - RNA, 14 nt, Homo Sapiens
agagauguccaagc

SEQ ID NO: 1694 - RNA, 15 nt, Homo Sapiens
agcaaagagaagaua

SEQ ID NO: 1695 - RNA, 15 nt, Homo Sapiens
agccaugggugugau

SEQ ID NO: 1696 - RNA, 16 nt, Homo Sapiens
agccaugggugugaug

SEQ ID NO: 1697 - RNA, 17 nt, Homo Sapiens
agccaugggugugauga

SEQ ID NO: 1698 - RNA, 15 nt, Homo Sapiens
agcccacagcccaga

SEQ ID NO: 1699 - RNA, 14 nt, Homo Sapiens
agcuccuaugacau

SEQ ID NO: 1700 - RNA, 15 nt, Homo Sapiens
agcuccucacaggca

SEQ ID NO: 1701 - RNA, 16 nt, Homo Sapiens
agcuccucacaggcaa

SEQ ID NO: 1702 - RNA, 15 nt, Homo Sapiens
aggaaaucugaugcu

SEQ ID NO: 1703 - RNA, 15 nt, Homo Sapiens
aggauaaaauuggau

SEQ ID NO: 1704 - RNA, 14 nt, Homo Sapiens
aggauguaucaguu

SEQ ID NO: 1705 - RNA, 16 nt, Homo Sapiens
aggcagagcuggaggc

SEQ ID NO: 1706 - RNA, 15 nt, Homo Sapiens
aggggcccaggacca

SEQ ID NO: 1707 - RNA, 16 nt, Homo Sapiens
aggggcccaggaccac

SEQ ID NO: 1708 - RNA, 14 nt, Homo Sapiens
agggggcuccugcc

SEQ ID NO: 1709 - RNA, 14 nt, Homo Sapiens
agugggguuacaua

SEQ ID NO: 1710 - RNA, 15 nt, Homo Sapiens
agugggguuacauaa

SEQ ID NO: 1711 - RNA, 16 nt, Homo Sapiens
agugggguuacauaac

SEQ ID NO: 1712 - RNA, 17 nt, Homo Sapiens
agugggguuacauaacu

SEQ ID NO: 1713 - RNA, 18 nt, Homo Sapiens
agugggguuacauaacug

SEQ ID NO: 1714 - RNA, 14 nt, Homo Sapiens
aguguagucacagg

SEQ ID NO: 1715 - RNA, 15 nt, Homo Sapiens
aguuugaaguauucc

SEQ ID NO: 1716 - RNA, 17 nt, Homo Sapiens
auaaacaaaauaaugua

SEQ ID NO: 1717 - RNA, 14 nt, Homo Sapiens
auaaauguuugccg

SEQ ID NO: 1718 - RNA, 14 nt, Homo Sapiens
auaggagcauggca

SEQ ID NO: 1719 - RNA, 14 nt, Homo Sapiens
auaugaucaauuga

SEQ ID NO: 1720 - RNA, 15 nt, Homo Sapiens
auaugaucaauugau

SEQ ID NO: 1721 - RNA, 15 nt, Homo Sapiens
auauguguaaugaau

SEQ ID NO: 1722 - RNA, 14 nt, Homo Sapiens
auccaauauacaaa

SEQ ID NO: 1723 - RNA, 14 nt, Homo Sapiens
auccucuuggcaug

SEQ ID NO: 1724 - RNA, 15 nt, Homo Sapiens
aucuuuucccuggaa

SEQ ID NO: 1725 - RNA, 15 nt, Homo Sapiens
augaccuccagguuc

SEQ ID NO: 1726 - RNA, 14 nt, Homo Sapiens
augaguaugaguaa

SEQ ID NO: 1727 - RNA, 15 nt, Homo Sapiens
auggauauaagauau

SEQ ID NO: 1728 - RNA, 15 nt, Homo Sapiens
auguggggagggggu

SEQ ID NO: 1729 - RNA, 16 nt, Homo Sapiens
auguggggaggggguu

SEQ ID NO: 1730 - RNA, 15 nt, Homo Sapiens
auuacccauuuccca

SEQ ID NO: 1731 - RNA, 16 nt, Homo Sapiens
auuacccauuucccag

SEQ ID NO: 1732 - RNA, 14 nt, Homo Sapiens
auucucuagagagu

SEQ ID NO: 1733 - RNA, 15 nt, Homo Sapiens
auuguacaaggaaaa

SEQ ID NO: 1734 - RNA, 16 nt, Homo Sapiens
auuguacaaggaaaau

SEQ ID NO: 1735 - RNA, 17 nt, Homo Sapiens
auuguacaaggaaaauu

SEQ ID NO: 1736 - RNA, 18 nt, Homo Sapiens
auuguacaaggaaaauua

SEQ ID NO: 1737 - RNA, 19 nt, Homo Sapiens
auuguacaaggaaaauuag

SEQ ID NO: 1738 - RNA, 15 nt, Homo Sapiens
auuugaggcaagaga

SEQ ID NO: 1739 - RNA, 16 nt, Homo Sapiens
auuuguaaauguauau

SEQ ID NO: 1740 - RNA, 14 nt, Homo Sapiens
caaaugucuaaggu

SEQ ID NO: 1741 - RNA, 15 nt, Homo Sapiens
cagagcugaggucaa

SEQ ID NO: 1742 - RNA, 15 nt, Homo Sapiens
cagccacagaaagaa

SEQ ID NO: 1743 - RNA, 14 nt, Homo Sapiens
cagggcuagauugu

SEQ ID NO: 1744 - RNA, 16 nt, Homo Sapiens
cauaaacaaaauaaug

SEQ ID NO: 1745 - RNA, 17 nt, Homo Sapiens
cauaaacaaaauaaugu

SEQ ID NO: 1746 - RNA, 18 nt, Homo Sapiens
cauaaacaaaauaaugua

SEQ ID NO: 1747 - RNA, 14 nt, Homo Sapiens
cauaggagcauggc

SEQ ID NO: 1748 - RNA, 15 nt, Homo Sapiens
cauaggagcauggca

SEQ ID NO: 1749 - RNA, 14 nt, Homo Sapiens
caugggugugauga

SEQ ID NO: 1750 - RNA, 15 nt, Homo Sapiens
ccaaaaacauuaaaa

SEQ ID NO: 1751 - RNA, 14 nt, Homo Sapiens
ccaagcccucagaa

SEQ ID NO: 1752 - RNA, 17 nt, Homo Sapiens
ccacacccacacacacc

SEQ ID NO: 1753 - RNA, 14 nt, Homo Sapiens
ccagggcccaauau

SEQ ID NO: 1754 - RNA, 14 nt, Homo Sapiens
ccaugggugugaug

SEQ ID NO: 1755 - RNA, 15 nt, Homo Sapiens
ccaugggugugauga

SEQ ID NO: 1756 - RNA, 14 nt, Homo Sapiens
cccaaaaacauuaa

SEQ ID NO: 1757 - RNA, 15 nt, Homo Sapiens
cccaaaaacauuaaa

SEQ ID NO: 1758 - RNA, 16 nt, Homo Sapiens
cccaaaaacauuaaaa

SEQ ID NO: 1759 - RNA, 14 nt, Homo Sapiens
cccuuggacacaca

SEQ ID NO: 1760 - RNA, 14 nt, Homo Sapiens
ccgcguccagcugg

SEQ ID NO: 1761 - RNA, 15 nt, Homo Sapiens
ccucugagugggugg

SEQ ID NO: 1762 - RNA, 14 nt, Homo Sapiens
ccugguagcagccu

SEQ ID NO: 1763 - RNA, 14 nt, Homo Sapiens
cggaugugggcacu

SEQ ID NO: 1764 - RNA, 14 nt, Homo Sapiens
cucaccaaacacaa

SEQ ID NO: 1765 - RNA, 15 nt, Homo Sapiens
cucaccaaacacaag

SEQ ID NO: 1766 - RNA, 20 nt, Homo Sapiens
cucagaaaauuaaaaauaga

SEQ ID NO: 1767 - RNA, 15 nt, Homo Sapiens
cucagugaggcugac

SEQ ID NO: 1768 - RNA, 14 nt, Homo Sapiens
cuccucugguugcu

SEQ ID NO: 1769 - RNA, 15 nt, Homo Sapiens
cuccugucuggcccu

SEQ ID NO: 1770 - RNA, 15 nt, Homo Sapiens
cugacucagggugag

SEQ ID NO: 1771 - RNA, 16 nt, Homo Sapiens
cugacucagggugaga

SEQ ID NO: 1772 - RNA, 19 nt, Homo Sapiens
cugagucuguuuccucauc

SEQ ID NO: 1773 - RNA, 20 nt, Homo Sapiens
cugagucuguuuccucaucu

SEQ ID NO: 1774 - RNA, 16 nt, Homo Sapiens
cugcagacauuugcuu

SEQ ID NO: 1775 - RNA, 14 nt, Homo Sapiens
cugcauuauccuau

SEQ ID NO: 1776 - RNA, 15 nt, Homo Sapiens
cugccaacaccagcc

SEQ ID NO: 1777 - RNA, 16 nt, Homo Sapiens
cugccaacaccagcca

SEQ ID NO: 1778 - RNA, 17 nt, Homo Sapiens
cugccaacaccagccac

SEQ ID NO: 1779 - RNA, 15 nt, Homo Sapiens
cugggaaguagcaga

SEQ ID NO: 1780 - RNA, 16 nt, Homo Sapiens
cugggaaguagcagag

SEQ ID NO: 1781 - RNA, 17 nt, Homo Sapiens
cugggaaguagcagagg

SEQ ID NO: 1782 - RNA, 15 nt, Homo Sapiens
cuucuugcuuggaga

SEQ ID NO: 1783 - RNA, 14 nt, Homo Sapiens
cuuguuggaaagca

SEQ ID NO: 1784 - RNA, 15 nt, Homo Sapiens
gaaagcccucagaau

SEQ ID NO: 1785 - RNA, 16 nt, Homo Sapiens
gaaagcccucagaauc

SEQ ID NO: 1786 - RNA, 17 nt, Homo Sapiens
gaaagcccucagaaucc

SEQ ID NO: 1787 - RNA, 15 nt, Homo Sapiens
gaacaugcauuuugg

SEQ ID NO: 1788 - RNA, 14 nt, Homo Sapiens
gaacccuggccuug

SEQ ID NO: 1789 - RNA, 16 nt, Homo Sapiens
gaaggaagaggcucug

SEQ ID NO: 1790 - RNA, 17 nt, Homo Sapiens
gaaggaagaggcucugc

SEQ ID NO: 1791 - RNA, 14 nt, Homo Sapiens
gaauauuccugugg

SEQ ID NO: 1792 - RNA, 14 nt, Homo Sapiens
gacauaggagcaug

SEQ ID NO: 1793 - RNA, 15 nt, Homo Sapiens
gacauaggagcaugg

SEQ ID NO: 1794 - RNA, 16 nt, Homo Sapiens
gacauaggagcauggc

SEQ ID NO: 1795 - RNA, 17 nt, Homo Sapiens
gacauaggagcauggca

SEQ ID NO: 1796 - RNA, 14 nt, Homo Sapiens
gacccacaacacag

SEQ ID NO: 1797 - RNA, 14 nt, Homo Sapiens
gacggcacaggcca

SEQ ID NO: 1798 - RNA, 14 nt, Homo Sapiens
gacucagggugaga

SEQ ID NO: 1799 - RNA, 15 nt, Homo Sapiens
gagacauggcuggug

SEQ ID NO: 1800 - RNA, 18 nt, Homo Sapiens
gagagaaaaggaagaaag

SEQ ID NO: 1801 - RNA, 14 nt, Homo Sapiens
gagcaagaaccgga

SEQ ID NO: 1802 - RNA, 15 nt, Homo Sapiens
gaggauaaaauugga

SEQ ID NO: 1803 - RNA, 16 nt, Homo Sapiens
gaggauaaaauuggau

SEQ ID NO: 1804 - RNA, 14 nt, Homo Sapiens
gaggcacucucagg

SEQ ID NO: 1805 - RNA, 14 nt, Homo Sapiens
gagggguagaggcc

SEQ ID NO: 1806 - RNA, 17 nt, Homo Sapiens
gagucuguuuccucauc

SEQ ID NO: 1807 - RNA, 18 nt, Homo Sapiens
gagucuguuuccucaucu

SEQ ID NO: 1808 - RNA, 14 nt, Homo Sapiens
gauagaucugaggc

SEQ ID NO: 1809 - RNA, 14 nt, Homo Sapiens
gaucaucagugagu

SEQ ID NO: 1810 - RNA, 14 nt, Homo Sapiens
gaugaguaugagua

SEQ ID NO: 1811 - RNA, 15 nt, Homo Sapiens
gaugaguaugaguaa

SEQ ID NO: 1812 - RNA, 14 nt, Homo Sapiens
gauggccuggggaa

SEQ ID NO: 1813 - RNA, 16 nt, Homo Sapiens
gcagggcccagcaggg

SEQ ID NO: 1814 - RNA, 14 nt, Homo Sapiens
gcagucuuuuccug

SEQ ID NO: 1815 - RNA, 16 nt, Homo Sapiens
gcauaaacaaaauaau

SEQ ID NO: 1816 - RNA, 17 nt, Homo Sapiens
gcauaaacaaaauaaug

SEQ ID NO: 1817 - RNA, 18 nt, Homo Sapiens
gcauaaacaaaauaaugu

SEQ ID NO: 1818 - RNA, 19 nt, Homo Sapiens
gcauaaacaaaauaaugua

SEQ ID NO: 1819 - RNA, 14 nt, Homo Sapiens
gcaucuagugcagg

SEQ ID NO: 1820 - RNA, 15 nt, Homo Sapiens
gccaacaccagccac

SEQ ID NO: 1821 - RNA, 15 nt, Homo Sapiens
gccaggagggcaaag

SEQ ID NO: 1822 - RNA, 14 nt, Homo Sapiens
gccaugggugugau

SEQ ID NO: 1823 - RNA, 15 nt, Homo Sapiens
gccaugggugugaug

SEQ ID NO: 1824 - RNA, 16 nt, Homo Sapiens
gccaugggugugauga

SEQ ID NO: 1825 - RNA, 14 nt, Homo Sapiens
gccauuucaaccau

SEQ ID NO: 1826 - RNA, 14 nt, Homo Sapiens
gcucccuuaaucca

SEQ ID NO: 1827 - RNA, 15 nt, Homo Sapiens
gcucccuuaauccag

SEQ ID NO: 1828 - RNA, 15 nt, Homo Sapiens
gcuccucacaggcaa

SEQ ID NO: 1829 - RNA, 15 nt, Homo Sapiens
gcuccuucucuaccc

SEQ ID NO: 1830 - RNA, 15 nt, Homo Sapiens
gcucuucuccucucc

SEQ ID NO: 1831 - RNA, 14 nt, Homo Sapiens
gcugcauuauccua

SEQ ID NO: 1832 - RNA, 15 nt, Homo Sapiens
gcugcauuauccuau

SEQ ID NO: 1833 - RNA, 15 nt, Homo Sapiens
gcugggaaguagcag

SEQ ID NO: 1834 - RNA, 16 nt, Homo Sapiens
gcugggaaguagcaga

SEQ ID NO: 1835 - RNA, 17 nt, Homo Sapiens
gcugggaaguagcagag

SEQ ID NO: 1836 - RNA, 18 nt, Homo Sapiens
gcugggaaguagcagagg

SEQ ID NO: 1837 - RNA, 14 nt, Homo Sapiens
gcuuuggcguggga

SEQ ID NO: 1838 - RNA, 14 nt, Homo Sapiens
ggaccuggggucaa

SEQ ID NO: 1839 - RNA, 14 nt, Homo Sapiens
ggagaaugguagug

SEQ ID NO: 1840 - RNA, 15 nt, Homo Sapiens
ggaguaaauguuuuu

SEQ ID NO: 1841 - RNA, 14 nt, Homo Sapiens
ggagucucuuacuc

SEQ ID NO: 1842 - RNA, 14 nt, Homo Sapiens
ggauaaaauuggau

SEQ ID NO: 1843 - RNA, 15 nt, Homo Sapiens
ggaucccuggggaag

SEQ ID NO: 1844 - RNA, 15 nt, Homo Sapiens
ggcagucuuuuccug

SEQ ID NO: 1845 - RNA, 14 nt, Homo Sapiens
ggcaugaaaauggg

SEQ ID NO: 1846 - RNA, 15 nt, Homo Sapiens
ggcaugaaaaugggc

SEQ ID NO: 1847 - RNA, 15 nt, Homo Sapiens
gggaaguagcagagg

SEQ ID NO: 1848 - RNA, 14 nt, Homo Sapiens
gggacucggaggga

SEQ ID NO: 1849 - RNA, 16 nt, Homo Sapiens
gggaggagcugggguc

SEQ ID NO: 1850 - RNA, 14 nt, Homo Sapiens
gggcagucuuuucc

SEQ ID NO: 1851 - RNA, 15 nt, Homo Sapiens
gggcagucuuuuccu

SEQ ID NO: 1852 - RNA, 16 nt, Homo Sapiens
gggcagucuuuuccug

SEQ ID NO: 1853 - RNA, 15 nt, Homo Sapiens
ggggcccaggaccac

SEQ ID NO: 1854 - RNA, 14 nt, Homo Sapiens
gggguuacauaacu

SEQ ID NO: 1855 - RNA, 15 nt, Homo Sapiens
gggguuacauaacug

SEQ ID NO: 1856 - RNA, 14 nt, Homo Sapiens
ggguuacauaacug

SEQ ID NO: 1857 - RNA, 15 nt, Homo Sapiens
ggguuccucuuuuua

SEQ ID NO: 1858 - RNA, 14 nt, Homo Sapiens
gguaagaauaucag

SEQ ID NO: 1859 - RNA, 14 nt, Homo Sapiens
ggugcacacccagg

SEQ ID NO: 1860 - RNA, 14 nt, Homo Sapiens
gguuucacagccua

SEQ ID NO: 1861 - RNA, 15 nt, Homo Sapiens
guacaaggaaaauua

SEQ ID NO: 1862 - RNA, 16 nt, Homo Sapiens
guacaaggaaaauuag

SEQ ID NO: 1863 - RNA, 14 nt, Homo Sapiens
guagaaguuaugga

SEQ ID NO: 1864 - RNA, 15 nt, Homo Sapiens
guaggcagaaaaaua

SEQ ID NO: 1865 - RNA, 16 nt, Homo Sapiens
guaggcagaaaaauaa

SEQ ID NO: 1866 - RNA, 15 nt, Homo Sapiens
guauaaaacaaacac

SEQ ID NO: 1867 - RNA, 14 nt, Homo Sapiens
guauggcuauggcu

SEQ ID NO: 1868 - RNA, 14 nt, Homo Sapiens
gucccuaccaggaa

SEQ ID NO: 1869 - RNA, 15 nt, Homo Sapiens
gucccuaccaggaac

SEQ ID NO: 1870 - RNA, 14 nt, Homo Sapiens
guccucagaggcau

SEQ ID NO: 1871 - RNA, 14 nt, Homo Sapiens
guccugguagcagc

SEQ ID NO: 1872 - RNA, 15 nt, Homo Sapiens
guccugguagcagcc

SEQ ID NO: 1873 - RNA, 16 nt, Homo Sapiens
guccugguagcagccu

SEQ ID NO: 1874 - RNA, 14 nt, Homo Sapiens
gucuaccuguagga

SEQ ID NO: 1875 - RNA, 15 nt, Homo Sapiens
gucuaccuguaggau

SEQ ID NO: 1876 - RNA, 14 nt, Homo Sapiens
gucuacuuugcagc

SEQ ID NO: 1877 - RNA, 14 nt, Homo Sapiens
gucuaugguuguaa

SEQ ID NO: 1878 - RNA, 15 nt, Homo Sapiens
gucucuguugcaaca

SEQ ID NO: 1879 - RNA, 16 nt, Homo Sapiens
gucucuguugcaacaa

SEQ ID NO: 1880 - RNA, 15 nt, Homo Sapiens
gugauagaaccagaa

SEQ ID NO: 1881 - RNA, 14 nt, Homo Sapiens
gugcccaugaauuu

SEQ ID NO: 1882 - RNA, 14 nt, Homo Sapiens
gugggcggccugcu

SEQ ID NO: 1883 - RNA, 15 nt, Homo Sapiens
gugggcggccugcug

SEQ ID NO: 1884 - RNA, 16 nt, Homo Sapiens
gugggcggccugcugg

SEQ ID NO: 1885 - RNA, 14 nt, Homo Sapiens
gugggguuacauaa

SEQ ID NO: 1886 - RNA, 15 nt, Homo Sapiens
gugggguuacauaac

SEQ ID NO: 1887 - RNA, 16 nt, Homo Sapiens
gugggguuacauaacu

SEQ ID NO: 1888 - RNA, 17 nt, Homo Sapiens
gugggguuacauaacug

SEQ ID NO: 1889 - RNA, 15 nt, Homo Sapiens
gugucugguauuguu

SEQ ID NO: 1890 - RNA, 15 nt, Homo Sapiens
gugucugucuguuca

SEQ ID NO: 1891 - RNA, 14 nt, Homo Sapiens
guuacagccuaucu

SEQ ID NO: 1892 - RNA, 15 nt, Homo Sapiens
guuacagccuaucuc

SEQ ID NO: 1893 - RNA, 15 nt, Homo Sapiens
guucuaauuucagcu

SEQ ID NO: 1894 - RNA, 14 nt, Homo Sapiens
guuggucaucaaac

SEQ ID NO: 1895 - RNA, 14 nt, Homo Sapiens
guuucaagccaggg

SEQ ID NO: 1896 - RNA, 15 nt, Homo Sapiens
uaaaaucaaggugac

SEQ ID NO: 1897 - RNA, 16 nt, Homo Sapiens
uaaaaucaaggugaca

SEQ ID NO: 1898 - RNA, 17 nt, Homo Sapiens
uaaaaucaaggugacag

SEQ ID NO: 1899 - RNA, 18 nt, Homo Sapiens
uaaaaucaaggugacagc

SEQ ID NO: 1900 - RNA, 16 nt, Homo Sapiens
uaaacaaaauaaugua

SEQ ID NO: 1901 - RNA, 14 nt, Homo Sapiens
uaaauccucuccuc

SEQ ID NO: 1902 - RNA, 15 nt, Homo Sapiens
uaacuucccuguguu

SEQ ID NO: 1903 - RNA, 15 nt, Homo Sapiens
uaagaaaacaacucu

SEQ ID NO: 1904 - RNA, 16 nt, Homo Sapiens
uaagaaaacaacucug

SEQ ID NO: 1905 - RNA, 15 nt, Homo Sapiens
uacaaggaaaauuag

SEQ ID NO: 1906 - RNA, 14 nt, Homo Sapiens
uacccauucauagu

SEQ ID NO: 1907 - RNA, 14 nt, Homo Sapiens
uagagaaaucuccc

SEQ ID NO: 1908 - RNA, 14 nt, Homo Sapiens
uaucuaagcugcuu

SEQ ID NO: 1909 - RNA, 15 nt, Homo Sapiens
uaucuucaucugucc

SEQ ID NO: 1910 - RNA, 14 nt, Homo Sapiens
uauucuaagugggu

SEQ ID NO: 1911 - RNA, 14 nt, Homo Sapiens
ucaccaaacacaag

SEQ ID NO: 1912 - RNA, 14 nt, Homo Sapiens
ucaccagcuacaga

SEQ ID NO: 1913 - RNA, 19 nt, Homo Sapiens
ucagaaaauuaaaaauaga

SEQ ID NO: 1914 - RNA, 14 nt, Homo Sapiens
ucagauugacccua

SEQ ID NO: 1915 - RNA, 16 nt, Homo Sapiens
uccacacccacacaca

SEQ ID NO: 1916 - RNA, 17 nt, Homo Sapiens
uccacacccacacacac

SEQ ID NO: 1917 - RNA, 18 nt, Homo Sapiens
uccacacccacacacacc

SEQ ID NO: 1918 - RNA, 14 nt, Homo Sapiens
ucccuaccaggaac

SEQ ID NO: 1919 - RNA, 15 nt, Homo Sapiens
uccugacccugcccu

SEQ ID NO: 1920 - RNA, 14 nt, Homo Sapiens
uccugguagcagcc

SEQ ID NO: 1921 - RNA, 15 nt, Homo Sapiens
uccugguagcagccu

SEQ ID NO: 1922 - RNA, 15 nt, Homo Sapiens
uccuggucucuucua

SEQ ID NO: 1923 - RNA, 14 nt, Homo Sapiens
ucuaaucaccucca

SEQ ID NO: 1924 - RNA, 14 nt, Homo Sapiens
ucuaccuguaggau

SEQ ID NO: 1925 - RNA, 14 nt, Homo Sapiens
ucucaaguuggaug

SEQ ID NO: 1926 - RNA, 14 nt, Homo Sapiens
ucucacuucagucc

SEQ ID NO: 1927 - RNA, 14 nt, Homo Sapiens
ucuccaucagucgc

SEQ ID NO: 1928 - RNA, 15 nt, Homo Sapiens
ucuccugucuggccc

SEQ ID NO: 1929 - RNA, 16 nt, Homo Sapiens
ucuccugucuggcccu

SEQ ID NO: 1930 - RNA, 15 nt, Homo Sapiens
ucuucuauucuuuag

SEQ ID NO: 1931 - RNA, 16 nt, Homo Sapiens
ucuuuuucagaaacua

SEQ ID NO: 1932 - RNA, 15 nt, Homo Sapiens
ugaagcacacagaca

SEQ ID NO: 1933 - RNA, 15 nt, Homo Sapiens
ugaauauuccugugg

SEQ ID NO: 1934 - RNA, 15 nt, Homo Sapiens
ugaaugccugcucca

SEQ ID NO: 1935 - RNA, 15 nt, Homo Sapiens
ugacucagggugaga

SEQ ID NO: 1936 - RNA, 18 nt, Homo Sapiens
ugagucuguuuccucauc

SEQ ID NO: 1937 - RNA, 19 nt, Homo Sapiens
ugagucuguuuccucaucu

SEQ ID NO: 1938 - RNA, 15 nt, Homo Sapiens
ugcagacauuugcuu

SEQ ID NO: 1939 - RNA, 14 nt, Homo Sapiens
ugccaacaccagcc

SEQ ID NO: 1940 - RNA, 15 nt, Homo Sapiens
ugccaacaccagcca

SEQ ID NO: 1941 - RNA, 16 nt, Homo Sapiens
ugccaacaccagccac

SEQ ID NO: 1942 - RNA, 15 nt, Homo Sapiens
ugcugcauuauccua

SEQ ID NO: 1943 - RNA, 16 nt, Homo Sapiens
ugcugcauuauccuau

SEQ ID NO: 1944 - RNA, 15 nt, Homo Sapiens
ugcugggcccacauu

SEQ ID NO: 1945 - RNA, 15 nt, Homo Sapiens
uggacugagccucag

SEQ ID NO: 1946 - RNA, 15 nt, Homo Sapiens
uggcaugaaaauggg

SEQ ID NO: 1947 - RNA, 16 nt, Homo Sapiens
uggcaugaaaaugggc

SEQ ID NO: 1948 - RNA, 15 nt, Homo Sapiens
ugggaaguagcagag

SEQ ID NO: 1949 - RNA, 16 nt, Homo Sapiens
ugggaaguagcagagg

SEQ ID NO: 1950 - RNA, 14 nt, Homo Sapiens
ugggcggccugcug

SEQ ID NO: 1951 - RNA, 15 nt, Homo Sapiens
ugggcggccugcugg

SEQ ID NO: 1952 - RNA, 14 nt, Homo Sapiens
ugggguuacauaac

SEQ ID NO: 1953 - RNA, 15 nt, Homo Sapiens
ugggguuacauaacu

SEQ ID NO: 1954 - RNA, 16 nt, Homo Sapiens
ugggguuacauaacug

SEQ ID NO: 1955 - RNA, 15 nt, Homo Sapiens
uggguggugggaaua

SEQ ID NO: 1956 - RNA, 15 nt, Homo Sapiens
uggguuccucuuuuu

SEQ ID NO: 1957 - RNA, 16 nt, Homo Sapiens
uggguuccucuuuuua

SEQ ID NO: 1958 - RNA, 15 nt, Homo Sapiens
uguacaaggaaaauu

SEQ ID NO: 1959 - RNA, 16 nt, Homo Sapiens
uguacaaggaaaauua

SEQ ID NO: 1960 - RNA, 17 nt, Homo Sapiens
uguacaaggaaaauuag

SEQ ID NO: 1961 - RNA, 15 nt, Homo Sapiens
uguaggcagaaaaau

SEQ ID NO: 1962 - RNA, 16 nt, Homo Sapiens
uguaggcagaaaaaua

SEQ ID NO: 1963 - RNA, 17 nt, Homo Sapiens
uguaggcagaaaaauaa

SEQ ID NO: 1964 - RNA, 14 nt, Homo Sapiens
uguauggcuauggc

SEQ ID NO: 1965 - RNA, 15 nt, Homo Sapiens
uguauggcuauggcu

SEQ ID NO: 1966 - RNA, 16 nt, Homo Sapiens
ugugucugucuguuca

SEQ ID NO: 1967 - RNA, 14 nt, Homo Sapiens
uuacagccuaucuc

SEQ ID NO: 1968 - RNA, 16 nt, Homo Sapiens
uuccucaccucucucc

SEQ ID NO: 1969 - RNA, 20 nt, Homo Sapiens
uuccucagaaaauuaaaaau

SEQ ID NO: 1970 - RNA, 15 nt, Homo Sapiens
uucucacuucagucc

SEQ ID NO: 1971 - RNA, 16 nt, Homo Sapiens
uucuucuauucuuuag

SEQ ID NO: 1972 - RNA, 14 nt, Homo Sapiens
uugcaagggugcca

SEQ ID NO: 1973 - RNA, 15 nt, Homo Sapiens
uugcugcauuauccu

SEQ ID NO: 1974 - RNA, 16 nt, Homo Sapiens
uugcugcauuauccua

SEQ ID NO: 1975 - RNA, 17 nt, Homo Sapiens
uugcugcauuauccuau

SEQ ID NO: 1976 - RNA, 14 nt, Homo Sapiens
uuggacugagccuc

SEQ ID NO: 1977 - RNA, 15 nt, Homo Sapiens
uuggacugagccuca

SEQ ID NO: 1978 - RNA, 16 nt, Homo Sapiens
uuggacugagccucag

SEQ ID NO: 1979 - RNA, 15 nt, Homo Sapiens
uuggguuccucuuuu

SEQ ID NO: 1980 - RNA, 16 nt, Homo Sapiens
uuggguuccucuuuuu

SEQ ID NO: 1981 - RNA, 17 nt, Homo Sapiens
uuggguuccucuuuuua

SEQ ID NO: 1982 - RNA, 15 nt, Homo Sapiens
uuguacaaggaaaau

SEQ ID NO: 1983 - RNA, 16 nt, Homo Sapiens
uuguacaaggaaaauu

SEQ ID NO: 1984 - RNA, 17 nt, Homo Sapiens
uuguacaaggaaaauua

SEQ ID NO: 1985 - RNA, 18 nt, Homo Sapiens
uuguacaaggaaaauuag

SEQ ID NO: 1986 - RNA, 16 nt, Homo Sapiens
uuucuucuauucuuua

SEQ ID NO: 1987 - RNA, 17 nt, Homo Sapiens
uuucuucuauucuuuag

SEQ ID NO: 1988 - RNA, 15 nt, Homo Sapiens
uuuggacugagccuc

SEQ ID NO: 1989 - RNA, 16 nt, Homo Sapiens
uuuggacugagccuca

SEQ ID NO: 1990 - RNA, 17 nt, Homo Sapiens
uuuggacugagccucag

SEQ ID NO: 1991 - RNA, 15 nt, Homo Sapiens
uuuggguuccucuuu

SEQ ID NO: 1992 - RNA, 16 nt, Homo Sapiens
uuuggguuccucuuuu

SEQ ID NO: 1993 - RNA, 17 nt, Homo Sapiens
uuuggguuccucuuuuu

SEQ ID NO: 1994 - RNA, 18 nt, Homo Sapiens
uuuggguuccucuuuuua

SEQ ID NO: 1995 - RNA, 17 nt, Homo Sapiens
uuuucuucuauucuuua

SEQ ID NO: 1996 - RNA, 18 nt, Homo Sapiens
uuuucuucuauucuuuag

SEQ ID NO: 1997 - RNA, 15 nt, Homo Sapiens
uuuuggguuccucuu

SEQ ID NO: 1998 - RNA, 16 nt, Homo Sapiens
uuuuggguuccucuuu

SEQ ID NO: 1999 - RNA, 17 nt, Homo Sapiens
uuuuggguuccucuuuu

SEQ ID NO: 2000 - RNA, 18 nt, Homo Sapiens
uuuuggguuccucuuuuu

SEQ ID NO: 2001 - RNA, 19 nt, Homo Sapiens
uuuuggguuccucuuuuua

SEQ ID NO: 2002 - DNA, 18 bp, Artificial Sequence
  oligonucleotide - internucleotide bonds are phosphorothioate bonds (PS)
  modified_base (1)..(2): LNA nucleoside
  modified_base (17)..(18): LNA nucleoside
ccctttccttttcttttt

SEQ ID NO: 2003 - DNA, 18 bp, Artificial Sequence
  oligonucleotide - internucleotide bonds are phosphorothioate bonds (PS)
  modified_base (1)..(2): LNA nucleoside
  modified_base (16)..(18): LNA nucleoside
ccctttccttttcttttt

SEQ ID NO: 2004 - DNA, 18 bp, Artificial Sequence
  oligonucleotide - internucleotide bonds are phosphorothioate bonds (PS)
  modified_base (1)..(2): LNA nucleoside
  modified_base (15)..(18): LNA nucleoside
ccctttccttttcttttt

SEQ ID NO: 2005 - DNA, 17 bp, Artificial Sequence
  oligonucleotide - internucleotide bonds are phosphorothioate bonds (PS)
  modified_base (1)..(2): LNA nucleoside
  modified_base (16)..(17): LNA nucleoside
gctgtcaccttgatttt

SEQ ID NO: 2006 - DNA, 17 bp, Artificial Sequence
  oligonucleotide - internucleotide bonds are phosphorothioate bonds (PS)
  modified_base (1)..(2): LNA nucleoside
  modified_base (15)..(17): LNA nucleoside
gctgtcaccttgatttt

SEQ ID NO: 2007 - DNA, 17 bp, Artificial Sequence
  oligonucleotide - internucleotide bonds are phosphorothioate bonds (PS)
  modified_base (1)..(3): LNA nucleoside
  modified_base (15)..(17): LNA nucleoside
gctgtcaccttgatttt

SEQ ID NO: 2008 - DNA, 15 bp, Artificial Sequence
  oligonucleotide - internucleotide bonds are phosphorothioate bonds (PS)
  modified_base (1)..(2): LNA nucleoside
  modified_base (13)..(15): LNA nucleoside
gattctgagggcttt

SEQ ID NO: 2009 - DNA, 15 bp, Artificial Sequence
  oligonucleotide - internucleotide bonds are phosphorothioate bonds (PS)
  modified_base (1)..(2): LNA nucleoside
  modified_base (12)..(15): LNA nucleoside
gattctgagggcttt

SEQ ID NO: 2010 - DNA, 15 bp, Artificial Sequence
  oligonucleotide - internucleotide bonds are phosphorothioate bonds (PS)
  modified_base (1)..(4): LNA nucleoside
  modified_base (12)..(15): LNA nucleoside
gattctgagggcttt

SEQ ID NO: 2011 - DNA, 16 bp, Artificial Sequence
  oligonucleotide - internucleotide bonds are phosphorothioate bonds (PS)
  modified_base (1)..(2): LNA nucleoside
  modified_base (15)..(16): LNA nucleoside
ggattctgagggcttt

SEQ ID NO: 2012 - DNA, 16 bp, Artificial Sequence
  oligonucleotide - internucleotide bonds are phosphorothioate bonds (PS)
  modified_base (1)..(3): LNA nucleoside
  modified_base (15)..(16): LNA nucleoside
ggattctgagggcttt

SEQ ID NO: 2013 - DNA, 16 bp, Artificial Sequence
  oligonucleotide - internucleotide bonds are phosphorothioate bonds (PS)
  modified_base (1)..(4): LNA nucleoside
  modified_base (14)..(16): LNA nucleoside
ggattctgagggcttt

SEQ ID NO: 2014 - DNA, 15 bp, Artificial Sequence
  oligonucleotide - internucleotide bonds are phosphorothioate bonds (PS)
  modified_base (1)..(4): LNA nucleoside
  modified_base (13)..(15): LNA nucleoside
actgatacatccttt

SEQ ID NO: 2015 - DNA, 15 bp, Artificial Sequence
  oligonucleotide - internucleotide bonds are phosphorothioate bonds (PS)
  modified_base (1)..(3): LNA nucleoside
  modified_base (12)..(15): LNA nucleoside
actgatacatccttt

SEQ ID NO: 2016 - DNA, 15 bp, Artificial Sequence
  oligonucleotide - internucleotide bonds are phosphorothioate bonds (PS)
  modified_base (1)..(4): LNA nucleoside
  modified_base (12)..(15): LNA nucleoside
actgatacatccttt

SEQ ID NO: 2017 - DNA, 16 bp, Artificial Sequence
  oligonucleotide - internucleotide bonds are phosphorothioate bonds (PS)
  modified_base (1)..(3): LNA nucleoside
  modified_base (13)..(16): LNA nucleoside
aactgatacatccttt

SEQ ID NO: 2018 - DNA, 16 bp, Artificial Sequence
  oligonucleotide - internucleotide bonds are phosphorothioate bonds (PS)
  modified_base (1)..(4): LNA nucleoside
  modified_base (14)..(16): LNA nucleoside
aactgatacatccttt

SEQ ID NO: 2019 - DNA, 16 bp, Artificial Sequence
  oligonucleotide - internucleotide bonds are phosphorothioate bonds (PS)
  modified_base (1)..(4): LNA nucleoside
  modified_base (13)..(16): LNA nucleoside
aactgatacatccttt

SEQ ID NO: 2020 - DNA, 15 bp, Artificial Sequence
  oligonucleotide - internucleotide bonds are phosphorothioate bonds (PS)
  modified_base (1)..(3): LNA nucleoside
  modified_base (13)..(15): LNA nucleoside
cacttcactcacttt

SEQ ID NO: 2021 - DNA, 15 bp, Artificial Sequence
  oligonucleotide - internucleotide bonds are phosphorothioate bonds (PS)
  modified_base (1)..(4): LNA nucleoside
  modified_base (13)..(15): LNA nucleoside
cacttcactcacttt

SEQ ID NO: 2022 - DNA, 15 bp, Artificial Sequence
  oligonucleotide - internucleotide bonds are phosphorothioate bonds (PS)
  modified_base (1)..(4): LNA nucleoside
  modified_base (12)..(15): LNA nucleoside
cacttcactcacttt

SEQ ID NO: 2023 - DNA, 16 bp, Artificial Sequence
  oligonucleotide - internucleotide bonds are phosphorothioate bonds (PS)
  modified_base (1)..(2): LNA nucleoside
  modified_base (15)..(16): LNA nucleoside
ccacttcactcacttt

SEQ ID NO: 2024 - DNA, 16 bp, Artificial Sequence
  oligonucleotide - internucleotide bonds are phosphorothioate bonds (PS)
  modified_base (1)..(3): LNA nucleoside
  modified_base (14)..(16): LNA nucleoside
ccacttcactcacttt

SEQ ID NO: 2025 - DNA, 16 bp, Artificial Sequence
  oligonucleotide - internucleotide bonds are phosphorothioate bonds (PS)
  modified_base (1)..(3): LNA nucleoside
  modified_base (13)..(16): LNA nucleoside
ccacttcactcacttt

SEQ ID NO: 2026 - DNA, 14 bp, Artificial Sequence
  oligonucleotide - internucleotide bonds are phosphorothioate bonds (PS)
  modified_base (1)..(2): LNA nucleoside
  modified_base (13)..(14): LNA nucleoside
acctgctgcaggtt

SEQ ID NO: 2027 - DNA, 14 bp, Artificial Sequence
  oligonucleotide - internucleotide bonds are phosphorothioate bonds (PS)
  modified_base (1)..(3): LNA nucleoside
  modified_base (13)..(14): LNA nucleoside
acctgctgcaggtt

SEQ ID NO: 2028 - DNA, 14 bp, Artificial Sequence
  oligonucleotide - internucleotide bonds are phosphorothioate bonds (PS)
  modified_base (1)..(3): LNA nucleoside
  modified_base (12)..(14): LNA nucleoside
acctgctgcaggtt

SEQ ID NO: 2029 - DNA, 15 bp, Artificial Sequence
  oligonucleotide - internucleotide bonds are phosphorothioate bonds (PS)
  modified_base (1)..(3): LNA nucleoside
  modified_base (13)..(15): LNA nucleoside
cagagttgttttctt

SEQ ID NO: 2030 - DNA, 15 bp, Artificial Sequence
  oligonucleotide - internucleotide bonds are phosphorothioate bonds (PS)
  modified_base (1)..(3): LNA nucleoside
  modified_base (12)..(15): LNA nucleoside
cagagttgttttctt

SEQ ID NO: 2031 - DNA, 15 bp, Artificial Sequence
  oligonucleotide - internucleotide bonds are phosphorothioate bonds (PS)
  modified_base (1)..(4): LNA nucleoside
  modified_base (12)..(15): LNA nucleoside
cagagttgttttctt

SEQ ID NO: 2032 - DNA, 14 bp, Artificial Sequence
  oligonucleotide - internucleotide bonds are phosphorothioate bonds (PS)
  modified_base (1)..(2): LNA nucleoside
  modified_base (12)..(14): LNA nucleoside
gattctgagggctt

SEQ ID NO: 2033 - DNA, 14 bp, Artificial Sequence
  oligonucleotide - internucleotide bonds are phosphorothioate bonds (PS)
  modified_base (1)..(2): LNA nucleoside
  modified_base (11)..(14): LNA nucleoside
gattctgagggctt

SEQ ID NO: 2034 - DNA, 14 bp, Artificial Sequence
  oligonucleotide - internucleotide bonds are phosphorothioate bonds (PS)
  modified_base (1)..(4): LNA nucleoside
  modified_base (11)..(14): LNA nucleoside
gattctgagggctt

SEQ ID NO: 2035 - DNA, 15 bp, Artificial Sequence
  oligonucleotide - internucleotide bonds are phosphorothioate bonds (PS)
  modified_base (1)..(2): LNA nucleoside
  modified_base (14)..(15): LNA nucleoside
ggattctgagggctt

SEQ ID NO: 2036 - DNA, 15 bp, Artificial Sequence
  oligonucleotide - internucleotide bonds are phosphorothioate bonds (PS)
  modified_base (1)..(2): LNA nucleoside
  modified_base (13)..(15): LNA nucleoside
ggattctgagggctt

SEQ ID NO: 2037 - DNA, 15 bp, Artificial Sequence
  oligonucleotide - internucleotide bonds are phosphorothioate bonds (PS)
  modified_base (1)..(4): LNA nucleoside
  modified_base (13)..(15): LNA nucleoside
ggattctgagggctt

SEQ ID NO: 2038 - DNA, 16 bp, Artificial Sequence
  oligonucleotide - internucleotide bonds are phosphorothioate bonds (PS)
  modified_base (1)..(2): LNA nucleoside
  modified_base (15)..(16): LNA nucleoside
gcagagcctcttcctt

SEQ ID NO: 2039 - DNA, 16 bp, Artificial Sequence
  oligonucleotide - internucleotide bonds are phosphorothioate bonds (PS)
  modified_base (1)..(2): LNA nucleoside
  modified_base (14)..(16): LNA nucleoside
gcagagcctcttcctt

SEQ ID NO: 2040 - DNA, 16 bp, Artificial Sequence
  oligonucleotide - internucleotide bonds are phosphorothioate bonds (PS)
  modified_base (1)..(3): LNA nucleoside
  modified_base (15)..(16): LNA nucleoside
gcagagcctcttcctt

SEQ ID NO: 2041 - DNA, 14 bp, Artificial Sequence
  oligonucleotide - internucleotide bonds are phosphorothioate bonds (PS)
  modified_base (1)..(4): LNA nucleoside
  modified_base (12)..(14): LNA nucleoside
actgatacatcctt

SEQ ID NO: 2042 - DNA, 14 bp, Artificial Sequence
  oligonucleotide - internucleotide bonds are phosphorothioate bonds (PS)
  modified_base (1)..(3): LNA nucleoside
  modified_base (11)..(14): LNA nucleoside
actgatacatcctt

SEQ ID NO: 2043 - DNA, 14 bp, Artificial Sequence
  oligonucleotide - internucleotide bonds are phosphorothioate bonds (PS)
  modified_base (1)..(4): LNA nucleoside
  modified_base (11)..(14): LNA nucleoside
actgatacatcctt

SEQ ID NO: 2044 - DNA, 15 bp, Artificial Sequence
  oligonucleotide - internucleotide bonds are phosphorothioate bonds (PS)
  modified_base (1)..(4): LNA nucleoside
  modified_base (13)..(15): LNA nucleoside
aactgatacatcctt

SEQ ID NO: 2045 - DNA, 15 bp, Artificial Sequence
  oligonucleotide - internucleotide bonds are phosphorothioate bonds (PS)
  modified_base (1)..(3): LNA nucleoside
  modified_base (12)..(15): LNA nucleoside
aactgatacatcctt

SEQ ID NO: 2046 - DNA, 15 bp, Artificial Sequence
  oligonucleotide - internucleotide bonds are phosphorothioate bonds (PS)
  modified_base (1)..(4): LNA nucleoside
  modified_base (12)..(15): LNA nucleoside
aactgatacatcctt

SEQ ID NO: 2047 - DNA, 15 bp, Artificial Sequence
  oligonucleotide - internucleotide bonds are phosphorothioate bonds (PS)
  modified_base (1)..(2): LNA nucleoside
  modified_base (14)..(15): LNA nucleoside
acacctctgcccctt

SEQ ID NO: 2048 - DNA, 15 bp, Artificial Sequence
  oligonucleotide - internucleotide bonds are phosphorothioate bonds (PS)
  modified_base (1)..(3): LNA nucleoside
  modified_base (14)..(15): LNA nucleoside
acacctctgcccctt

SEQ ID NO: 2049 - DNA, 15 bp, Artificial Sequence
  oligonucleotide - internucleotide bonds are phosphorothioate bonds (PS)
  modified_base (1)..(2): LNA nucleoside
  modified_base (13)..(15): LNA nucleoside
acacctctgcccctt

SEQ ID NO: 2050 - DNA, 15 bp, Artificial Sequence
  oligonucleotide - internucleotide bonds are phosphorothioate bonds (PS)
  modified_base (1)..(2): LNA nucleoside
  modified_base (14)..(15): LNA nucleoside
ggtcctgggcccctt

SEQ ID NO: 2051 - DNA, 15 bp, Artificial Sequence
  oligonucleotide - internucleotide bonds are phosphorothioate bonds (PS)
  modified_base (1)..(2): LNA nucleoside
  modified_base (13)..(15): LNA nucleoside
ggtcctgggcccctt

SEQ ID NO: 2052 - DNA, 15 bp, Artificial Sequence
  oligonucleotide - internucleotide bonds are phosphorothioate bonds (PS)
  modified_base (1)..(3): LNA nucleoside
  modified_base (14)..(15): LNA nucleoside
ggtcctgggcccctt

SEQ ID NO: 2053 - DNA, 16 bp, Artificial Sequence
  oligonucleotide - internucleotide bonds are phosphorothioate bonds (PS)
  modified_base (1)..(2): LNA nucleoside
  modified_base (15)..(16): LNA nucleoside
tggtcctgggcccctt

SEQ ID NO: 2054 - DNA, 16 bp, Artificial Sequence
  oligonucleotide - internucleotide bonds are phosphorothioate bonds (PS)
  modified_base (1)..(3): LNA nucleoside
  modified_base (15)..(16): LNA nucleoside
tggtcctgggcccctt

SEQ ID NO: 2055 - DNA, 16 bp, Artificial Sequence
  oligonucleotide - internucleotide bonds are phosphorothioate bonds (PS)
  modified_base (1)..(2): LNA nucleoside
  modified_base (14)..(16): LNA nucleoside
tggtcctgggcccctt

SEQ ID NO: 2056 - DNA, 17 bp, Artificial Sequence
  oligonucleotide - internucleotide bonds are phosphorothioate bonds (PS)
  modified_base (1)..(2): LNA nucleoside
  modified_base (16)..(17): LNA nucleoside
gtggtcctgggcccctt

SEQ ID NO: 2057 - DNA, 17 bp, Artificial Sequence
  oligonucleotide - internucleotide bonds are phosphorothioate bonds (PS)
  modified_base (1)..(2): LNA nucleoside
  modified_base (15)..(17): LNA nucleoside
gtggtcctgggcccctt

SEQ ID NO: 2058 - DNA, 17 bp, Artificial Sequence
  oligonucleotide - internucleotide bonds are phosphorothioate bonds (PS)
  modified_base (1)..(3): LNA nucleoside
  modified_base (16)..(17): LNA nucleoside
gtggtcctgggcccctt

SEQ ID NO: 2059 - DNA, 15 bp, Artificial Sequence
  oligonucleotide - internucleotide bonds are phosphorothioate bonds (PS)
  modified_base (1)..(2): LNA nucleoside
  modified_base (14)..(15): LNA nucleoside
ccacttcactcactt

SEQ ID NO: 2060 - DNA, 15 bp, Artificial Sequence
  oligonucleotide - internucleotide bonds are phosphorothioate bonds (PS)
  modified_base (1)..(4): LNA nucleoside
  modified_base (14)..(15): LNA nucleoside
ccacttcactcactt

SEQ ID NO: 2061 - DNA, 15 bp, Artificial Sequence
  oligonucleotide - internucleotide bonds are phosphorothioate bonds (PS)
  modified_base (1)..(4): LNA nucleoside
  modified_base (12)..(15): LNA nucleoside
ccacttcactcactt

SEQ ID NO: 2062 - DNA, 16 bp, Artificial Sequence
  oligonucleotide - internucleotide bonds are phosphorothioate bonds (PS)
  modified_base (1)..(2): LNA nucleoside
  modified_base (13)..(16): LNA nucleoside
ataattctttgttatt

SEQ ID NO: 2063 - DNA, 16 bp, Artificial Sequence
  oligonucleotide - internucleotide bonds are phosphorothioate bonds (PS)
  modified_base (1)..(3): LNA nucleoside
  modified_base (13)..(16): LNA nucleoside
ataattctttgttatt

SEQ ID NO: 2064 - DNA, 16 bp, Artificial Sequence
  oligonucleotide - internucleotide bonds are phosphorothioate bonds (PS)
  modified_base (1)..(4): LNA nucleoside
  modified_base (13)..(16): LNA nucleoside
ataattctttgttatt

SEQ ID NO: 2065 - DNA, 16 bp, Artificial Sequence
  oligonucleotide - internucleotide bonds are phosphorothioate bonds (PS)
  modified_base (1)..(4): LNA nucleoside
  modified_base (14)..(16): LNA nucleoside
attcattacacatatt

SEQ ID NO: 2066 - DNA, 16 bp, Artificial Sequence
  oligonucleotide - internucleotide bonds are phosphorothioate bonds (PS)
  modified_base (1)..(3): LNA nucleoside
  modified_base (13)..(16): LNA nucleoside
attcattacacatatt

SEQ ID NO: 2067 - DNA, 16 bp, Artificial Sequence
  oligonucleotide - internucleotide bonds are phosphorothioate bonds (PS)
  modified_base (1)..(4): LNA nucleoside
  modified_base (13)..(16): LNA nucleoside
attcattacacatatt

SEQ ID NO: 2068 - DNA, 15 bp, Artificial Sequence
  oligonucleotide - internucleotide bonds are phosphorothioate bonds (PS)
  modified_base (1)..(3): LNA nucleoside
  modified_base (12)..(15): LNA nucleoside
tccagggaaaagatt

SEQ ID NO: 2069 - DNA, 15 bp, Artificial Sequence
  oligonucleotide - internucleotide bonds are phosphorothioate bonds (PS)
  modified_base (1)..(4): LNA nucleoside
  modified_base (13)..(15): LNA nucleoside
tccagggaaaagatt

SEQ ID NO: 2070 - DNA, 15 bp, Artificial Sequence
  oligonucleotide - internucleotide bonds are phosphorothioate bonds (PS)
  modified_base (1)..(4): LNA nucleoside
  modified_base (12)..(15): LNA nucleoside
tccagggaaaagatt

SEQ ID NO: 2071 - DNA, 16 bp, Artificial Sequence
  oligonucleotide - internucleotide bonds are phosphorothioate bonds (PS)
  modified_base (1)..(3): LNA nucleoside
  modified_base (13)..(16): LNA nucleoside
ttccagggaaaagatt

SEQ ID NO: 2072 - DNA, 16 bp, Artificial Sequence
  oligonucleotide - internucleotide bonds are phosphorothioate bonds (PS)
  modified_base (1)..(4): LNA nucleoside
  modified_base (14)..(16): LNA nucleoside
ttccagggaaaagatt

SEQ ID NO: 2073 - DNA, 16 bp, Artificial Sequence
  oligonucleotide - internucleotide bonds are phosphorothioate bonds (PS)
  modified_base (1)..(4): LNA nucleoside
  modified_base (13)..(16): LNA nucleoside
ttccagggaaaagatt

SEQ ID NO: 2074 - DNA, 14 bp, Artificial Sequence
  oligonucleotide - internucleotide bonds are phosphorothioate bonds (PS)
  modified_base (1)..(2): LNA nucleoside
  modified_base (11)..(14): LNA nucleoside
gtaactttatcatt

SEQ ID NO: 2075 - DNA, 14 bp, Artificial Sequence
  oligonucleotide - internucleotide bonds are phosphorothioate bonds (PS)
  modified_base (1)..(3): LNA nucleoside
  modified_base (11)..(14): LNA nucleoside
gtaactttatcatt

SEQ ID NO: 2076 - DNA, 14 bp, Artificial Sequence
  oligonucleotide - internucleotide bonds are phosphorothioate bonds (PS)
  modified_base (1)..(4): LNA nucleoside
  modified_base (11)..(14): LNA nucleoside
gtaactttatcatt

SEQ ID NO: 2077 - DNA, 15 bp, Artificial Sequence
  oligonucleotide - internucleotide bonds are phosphorothioate bonds (PS)
  modified_base (1)..(3): LNA nucleoside
  modified_base (12)..(15): LNA nucleoside
gtatttttatgaatt

SEQ ID NO: 2078 - DNA, 15 bp, Artificial Sequence
  oligonucleotide - internucleotide bonds are phosphorothioate bonds (PS)
  modified_base (1)..(4): LNA nucleoside
  modified_base (13)..(15): LNA nucleoside
gtatttttatgaatt

SEQ ID NO: 2079 - DNA, 15 bp, Artificial Sequence
  oligonucleotide - internucleotide bonds are phosphorothioate bonds (PS)
  modified_base (1)..(4): LNA nucleoside
  modified_base (12)..(15): LNA nucleoside
gtatttttatgaatt

SEQ ID NO: 2080 - DNA, 14 bp, Artificial Sequence
  oligonucleotide - internucleotide bonds are phosphorothioate bonds (PS)
  modified_base (1)..(2): LNA nucleoside
  modified_base (13)..(14): LNA nucleoside
ccatgctcctatgt

SEQ ID NO: 2081 - DNA, 14 bp, Artificial Sequence
  oligonucleotide - internucleotide bonds are phosphorothioate bonds (PS)
  modified_base (1)..(2): LNA nucleoside
  modified_base (12)..(14): LNA nucleoside
ccatgctcctatgt

SEQ ID NO: 2082 - DNA, 14 bp, Artificial Sequence
  oligonucleotide - internucleotide bonds are phosphorothioate bonds (PS)
  modified_base (1)..(3): LNA nucleoside
  modified_base (11)..(14): LNA nucleoside
ccatgctcctatgt

SEQ ID NO: 2083 - DNA, 15 bp, Artificial Sequence
  oligonucleotide - internucleotide bonds are phosphorothioate bonds (PS)
  modified_base (1)..(2): LNA nucleoside
  modified_base (14)..(15): LNA nucleoside
gccatgctcctatgt

SEQ ID NO: 2084 - DNA, 15 bp, Artificial Sequence
  oligonucleotide - internucleotide bonds are phosphorothioate bonds (PS)
  modified_base (1)..(2): LNA nucleoside
  modified_base (13)..(15): LNA nucleoside
gccatgctcctatgt

SEQ ID NO: 2085 - DNA, 15 bp, Artificial Sequence
  oligonucleotide - internucleotide bonds are phosphorothioate bonds (PS)
  modified_base (1)..(3): LNA nucleoside
  modified_base (14)..(15): LNA nucleoside
gccatgctcctatgt

SEQ ID NO: 2086 - DNA, 16 bp, Artificial Sequence
  oligonucleotide - internucleotide bonds are phosphorothioate bonds (PS)
  modified_base (1)..(2): LNA nucleoside
  modified_base (15)..(16): LNA nucleoside
tgccatgctcctatgt

SEQ ID NO: 2087 - DNA, 16 bp, Artificial Sequence
  oligonucleotide - internucleotide bonds are phosphorothioate bonds (PS)
  modified_base (1)..(2): LNA nucleoside
  modified_base (14)..(16): LNA nucleoside
tgccatgctcctatgt

SEQ ID NO: 2088 - DNA, 16 bp, Artificial Sequence
  oligonucleotide - internucleotide bonds are phosphorothioate bonds (PS)
  modified_base (1)..(3): LNA nucleoside
  modified_base (15)..(16): LNA nucleoside
tgccatgctcctatgt

SEQ ID NO: 2089 - DNA, 14 bp, Artificial Sequence
  oligonucleotide - internucleotide bonds are phosphorothioate bonds (PS)
  modified_base (1)..(2): LNA nucleoside
  modified_base (13)..(14): LNA nucleoside
cttcagttgctggt

SEQ ID NO: 2090 - DNA, 14 bp, Artificial Sequence
  oligonucleotide - internucleotide bonds are phosphorothioate bonds (PS)
  modified_base (1)..(3): LNA nucleoside
  modified_base (12)..(14): LNA nucleoside
cttcagttgctggt

SEQ ID NO: 2091 - DNA, 14 bp, Artificial Sequence
  oligonucleotide - internucleotide bonds are phosphorothioate bonds (PS)
  modified_base (1)..(4): LNA nucleoside
  modified_base (11)..(14): LNA nucleoside
cttcagttgctggt

SEQ ID NO: 2092 - DNA, 14 bp, Artificial Sequence
  oligonucleotide - internucleotide bonds are phosphorothioate bonds (PS)
  modified_base (1)..(2): LNA nucleoside
  modified_base (13)..(14): LNA nucleoside
ggccttggactggt

SEQ ID NO: 2093 - DNA, 14 bp, Artificial Sequence
  oligonucleotide - internucleotide bonds are phosphorothioate bonds (PS)
  modified_base (1)..(2): LNA nucleoside
  modified_base (12)..(14): LNA nucleoside
ggccttggactggt

SEQ ID NO: 2094 - DNA, 14 bp, Artificial Sequence
  oligonucleotide - internucleotide bonds are phosphorothioate bonds (PS)
  modified_base (1)..(3): LNA nucleoside
  modified_base (13)..(14): LNA nucleoside
ggccttggactggt

SEQ ID NO: 2095 - DNA, 15 bp, Artificial Sequence
  oligonucleotide - internucleotide bonds are phosphorothioate bonds (PS)
  modified_base (1)..(3): LNA nucleoside
  modified_base (12)..(15): LNA nucleoside
ttcaaagtcatttct

SEQ ID NO: 2096 - DNA, 15 bp, Artificial Sequence
  oligonucleotide - internucleotide bonds are phosphorothioate bonds (PS)
  modified_base (1)..(4): LNA nucleoside
  modified_base (13)..(15): LNA nucleoside
ttcaaagtcatttct

SEQ ID NO: 2097 - DNA, 15 bp, Artificial Sequence
  oligonucleotide - internucleotide bonds are phosphorothioate bonds (PS)
  modified_base (1)..(4): LNA nucleoside
  modified_base (12)..(15): LNA nucleoside
ttcaaagtcatttct

SEQ ID NO: 2098 - DNA, 15 bp, Artificial Sequence
  oligonucleotide - internucleotide bonds are phosphorothioate bonds (PS)
  modified_base (1)..(2): LNA nucleoside
  modified_base (12)..(15): LNA nucleoside
caaaatgcatgttct

SEQ ID NO: 2099 - DNA, 15 bp, Artificial Sequence
  oligonucleotide - internucleotide bonds are phosphorothioate bonds (PS)
  modified_base (1)..(3): LNA nucleoside
  modified_base (12)..(15): LNA nucleoside
caaaatgcatgttct

SEQ ID NO: 2100 - DNA, 15 bp, Artificial Sequence
  oligonucleotide - internucleotide bonds are phosphorothioate bonds (PS)
  modified_base (1)..(4): LNA nucleoside
  modified_base (12)..(15): LNA nucleoside
caaaatgcatgttct

SEQ ID NO: 2101 - DNA, 16 bp, Artificial Sequence
  oligonucleotide - internucleotide bonds are phosphorothioate bonds (PS)
  modified_base (1)..(2): LNA nucleoside
  modified_base (14)..(16): LNA nucleoside
ccaaaatgcatgttct

SEQ ID NO: 2102 - DNA, 16 bp, Artificial Sequence
  oligonucleotide - internucleotide bonds are phosphorothioate bonds (PS)
  modified_base (1)..(3): LNA nucleoside
  modified_base (14)..(16): LNA nucleoside
ccaaaatgcatgttct

SEQ ID NO: 2103 - DNA, 16 bp, Artificial Sequence
  oligonucleotide - internucleotide bonds are phosphorothioate bonds (PS)
  modified_base (1)..(4): LNA nucleoside
  modified_base (13)..(16): LNA nucleoside
ccaaaatgcatgttct

SEQ ID NO: 2104 - DNA, 14 bp, Artificial Sequence
  oligonucleotide - internucleotide bonds are phosphorothioate bonds (PS)
  modified_base (1)..(2): LNA nucleoside
  modified_base (13)..(14): LNA nucleoside
  modified_base (6)..(6): 5-methyl cytosine
tcatccgtgtgtct

SEQ ID NO: 2105 - DNA, 14 bp, Artificial Sequence
  oligonucleotide - internucleotide bonds are phosphorothioate bonds (PS)
  modified_base (1)..(4): LNA nucleoside
  modified_base (13)..(14): LNA nucleoside
  modified_base (6)..(6): 5-methyl cytosine
tcatccgtgtgtct

SEQ ID NO: 2106 - DNA, 14 bp, Artificial Sequence
  oligonucleotide - internucleotide bonds are phosphorothioate bonds (PS)
  modified_base (1)..(4): LNA nucleoside
  modified_base (11)..(14): LNA nucleoside
  modified_base (6)..(6): 5-methyl cytosine
tcatccgtgtgtct

SEQ ID NO: 2107 - DNA, 14 bp, Artificial Sequence
  oligonucleotide - internucleotide bonds are phosphorothioate bonds (PS)
  modified_base (1)..(2): LNA nucleoside
  modified_base (13)..(14): LNA nucleoside
  modified_base (10)..(10): 5-methyl cytosine
ggcctgtgccgtct

SEQ ID NO: 2108 - DNA, 14 bp, Artificial Sequence
  oligonucleotide - internucleotide bonds are phosphorothioate bonds (PS)
  modified_base (1)..(2): LNA nucleoside
  modified_base (12)..(14): LNA nucleoside
  modified_base (10)..(10): 5-methyl cytosine
ggcctgtgccgtct

SEQ ID NO: 2109 - DNA, 14 bp, Artificial Sequence
  oligonucleotide - internucleotide bonds are phosphorothioate bonds (PS)
  modified_base (1)..(3): LNA nucleoside
  modified_base (13)..(14): LNA nucleoside
  modified_base (10)..(10): 5-methyl cytosine
ggcctgtgccgtct

SEQ ID NO: 2110 - DNA, 15 bp, Artificial Sequence
  oligonucleotide - internucleotide bonds are phosphorothioate bonds (PS)
  modified_base (1)..(2): LNA nucleoside
  modified_base (14)..(15): LNA nucleoside
  modified_base (11)..(11): 5-methyl cytosine
tggcctgtgccgtct

SEQ ID NO: 2111 - DNA, 15 bp, Artificial Sequence
  oligonucleotide - internucleotide bonds are phosphorothioate bonds (PS)
  modified_base (1)..(2): LNA nucleoside
  modified_base (13)..(15): LNA nucleoside
  modified_base (11)..(11): 5-methyl cytosine
tggcctgtgccgtct

SEQ ID NO: 2112 - DNA, 15 bp, Artificial Sequence
  oligonucleotide - internucleotide bonds are phosphorothioate bonds (PS)
  modified_base (1)..(3): LNA nucleoside
  modified_base (14)..(15): LNA nucleoside
  modified_base (11)..(11): 5-methyl cytosine
tggcctgtgccgtct

SEQ ID NO: 2113 - DNA, 17 bp, Artificial Sequence
  oligonucleotide - internucleotide bonds are phosphorothioate bonds (PS)
  modified_base (1)..(2): LNA nucleoside
  modified_base (16)..(17): LNA nucleoside
ctttcttccttttctct

SEQ ID NO: 2114 - DNA, 17 bp, Artificial Sequence
  oligonucleotide - internucleotide bonds are phosphorothioate bonds (PS)
  modified_base (1)..(4): LNA nucleoside
  modified_base (16)..(17): LNA nucleoside
ctttcttccttttctct

SEQ ID NO: 2115 - DNA, 17 bp, Artificial Sequence
  oligonucleotide - internucleotide bonds are phosphorothioate bonds (PS)
  modified_base (1)..(4): LNA nucleoside
  modified_base (15)..(17): LNA nucleoside
ctttcttccttttctct

SEQ ID NO: 2116 - DNA, 14 bp, Artificial Sequence
  oligonucleotide - internucleotide bonds are phosphorothioate bonds (PS)
  modified_base (1)..(2): LNA nucleoside
  modified_base (13)..(14): LNA nucleoside
gcttggacatctct

SEQ ID NO: 2117 - DNA, 14 bp, Artificial Sequence
  oligonucleotide - internucleotide bonds are phosphorothioate bonds (PS)
  modified_base (1)..(4): LNA nucleoside
  modified_base (13)..(14): LNA nucleoside
gcttggacatctct

SEQ ID NO: 2118 - DNA, 14 bp, Artificial Sequence
  oligonucleotide - internucleotide bonds are phosphorothioate bonds (PS)
  modified_base (1)..(4): LNA nucleoside
  modified_base (11)..(14): LNA nucleoside
gcttggacatctct

SEQ ID NO: 2119 - DNA, 15 bp, Artificial Sequence
  oligonucleotide - internucleotide bonds are phosphorothioate bonds (PS)
  modified_base (1)..(3): LNA nucleoside
  modified_base (14)..(15): LNA nucleoside
tatcttctctttgct

SEQ ID NO: 2120 - DNA, 15 bp, Artificial Sequence
  oligonucleotide - internucleotide bonds are phosphorothioate bonds (PS)
  modified_base (1)..(2): LNA nucleoside
  modified_base (12)..(15): LNA nucleoside
tatcttctctttgct

SEQ ID NO: 2121 - DNA, 15 bp, Artificial Sequence
  oligonucleotide - internucleotide bonds are phosphorothioate bonds (PS)
  modified_base (1)..(4): LNA nucleoside
  modified_base (12)..(15): LNA nucleoside
tatcttctctttgct

SEQ ID NO: 2122 - DNA, 15 bp, Artificial Sequence
  oligonucleotide - internucleotide bonds are phosphorothioate bonds (PS)
  modified_base (1)..(2): LNA nucleoside
  modified_base (14)..(15): LNA nucleoside
atcacacccatggct

SEQ ID NO: 2123 - DNA, 15 bp, Artificial Sequence
  oligonucleotide - internucleotide bonds are phosphorothioate bonds (PS)
  modified_base (1)..(3): LNA nucleoside
  modified_base (14)..(15): LNA nucleoside
atcacacccatggct

SEQ ID NO: 2124 - DNA, 15 bp, Artificial Sequence
  oligonucleotide - internucleotide bonds are phosphorothioate bonds (PS)
  modified_base (1)..(4): LNA nucleoside
  modified_base (14)..(15): LNA nucleoside
atcacacccatggct

SEQ ID NO: 2125 - DNA, 16 bp, Artificial Sequence
  oligonucleotide - internucleotide bonds are phosphorothioate bonds (PS)
  modified_base (1)..(2): LNA nucleoside
  modified_base (15)..(16): LNA nucleoside
catcacacccatggct

SEQ ID NO: 2126 - DNA, 16 bp, Artificial Sequence
  oligonucleotide - internucleotide bonds are phosphorothioate bonds (PS)
  modified_base (1)..(3): LNA nucleoside
  modified_base (15)..(16): LNA nucleoside
catcacacccatggct

SEQ ID NO: 2127 - DNA, 16 bp, Artificial Sequence
  oligonucleotide - internucleotide bonds are phosphorothioate bonds (PS)
  modified_base (1)..(2): LNA nucleoside
  modified_base (14)..(16): LNA nucleoside
catcacacccatggct

SEQ ID NO: 2128 - DNA, 17 bp, Artificial Sequence
  oligonucleotide - internucleotide bonds are phosphorothioate bonds (PS)
  modified_base (1)..(2): LNA nucleoside
  modified_base (16)..(17): LNA nucleoside
tcatcacacccatggct

SEQ ID NO: 2129 - DNA, 17 bp, Artificial Sequence
  oligonucleotide - internucleotide bonds are phosphorothioate bonds (PS)
  modified_base (1)..(3): LNA nucleoside
  modified_base (16)..(17): LNA nucleoside
tcatcacacccatggct

SEQ ID NO: 2130 - DNA, 17 bp, Artificial Sequence
  oligonucleotide - internucleotide bonds are phosphorothioate bonds (PS)
  modified_base (1)..(2): LNA nucleoside
  modified_base (15)..(17): LNA nucleoside
tcatcacacccatggct

SEQ ID NO: 2131 - DNA, 15 bp, Artificial Sequence
  oligonucleotide - internucleotide bonds are phosphorothioate bonds (PS)
  modified_base (1)..(2): LNA nucleoside
  modified_base (14)..(15): LNA nucleoside
tctgggctgtgggct

SEQ ID NO: 2132 - DNA, 15 bp, Artificial Sequence
  oligonucleotide - internucleotide bonds are phosphorothioate bonds (PS)
  modified_base (1)..(3): LNA nucleoside
  modified_base (14)..(15): LNA nucleoside
tctgggctgtgggct

SEQ ID NO: 2133 - DNA, 15 bp, Artificial Sequence
  oligonucleotide - internucleotide bonds are phosphorothioate bonds (PS)
  modified_base (1)..(2): LNA nucleoside
  modified_base (13)..(15): LNA nucleoside
tctgggctgtgggct

SEQ ID NO: 2134 - DNA, 14 bp, Artificial Sequence
  oligonucleotide - internucleotide bonds are phosphorothioate bonds (PS)
  modified_base (1)..(2): LNA nucleoside
  modified_base (12)..(14): LNA nucleoside
atgtcataggagct

SEQ ID NO: 2135 - DNA, 14 bp, Artificial Sequence
  oligonucleotide - internucleotide bonds are phosphorothioate bonds (PS)
  modified_base (1)..(3): LNA nucleoside
  modified_base (11)..(14): LNA nucleoside
atgtcataggagct

SEQ ID NO: 2136 - DNA, 14 bp, Artificial Sequence
  oligonucleotide - internucleotide bonds are phosphorothioate bonds (PS)
  modified_base (1)..(4): LNA nucleoside
  modified_base (11)..(14): LNA nucleoside
atgtcataggagct

SEQ ID NO: 2137 - DNA, 15 bp, Artificial Sequence
  oligonucleotide - internucleotide bonds are phosphorothioate bonds (PS)
  modified_base (1)..(2): LNA nucleoside
  modified_base (14)..(15): LNA nucleoside
tgcctgtgaggagct

SEQ ID NO: 2138 - DNA, 15 bp, Artificial Sequence
  oligonucleotide - internucleotide bonds are phosphorothioate bonds (PS)
  modified_base (1)..(2): LNA nucleoside
  modified_base (13)..(15): LNA nucleoside
tgcctgtgaggagct

SEQ ID NO: 2139 - DNA, 15 bp, Artificial Sequence
  oligonucleotide - internucleotide bonds are phosphorothioate bonds (PS)
  modified_base (1)..(3): LNA nucleoside
  modified_base (14)..(15): LNA nucleoside
tgcctgtgaggagct

SEQ ID NO: 2140 - DNA, 16 bp, Artificial Sequence
  oligonucleotide - internucleotide bonds are phosphorothioate bonds (PS)
  modified_base (1)..(2): LNA nucleoside
  modified_base (15)..(16): LNA nucleoside
ttgcctgtgaggagct

SEQ ID NO: 2141 - DNA, 16 bp, Artificial Sequence
  oligonucleotide - internucleotide bonds are phosphorothioate bonds (PS)
  modified_base (1)..(3): LNA nucleoside
  modified_base (15)..(16): LNA nucleoside
ttgcctgtgaggagct

SEQ ID NO: 2142 - DNA, 16 bp, Artificial Sequence
  oligonucleotide - internucleotide bonds are phosphorothioate bonds (PS)
  modified_base (1)..(2): LNA nucleoside
  modified_base (14)..(16): LNA nucleoside
ttgcctgtgaggagct

SEQ ID NO: 2143 - DNA, 15 bp, Artificial Sequence
  oligonucleotide - internucleotide bonds are phosphorothioate bonds (PS)
  modified_base (1)..(2): LNA nucleoside
  modified_base (14)..(15): LNA nucleoside
agcatcagatttcct

SEQ ID NO: 2144 - DNA, 15 bp, Artificial Sequence
  oligonucleotide - internucleotide bonds are phosphorothioate bonds (PS)
  modified_base (1)..(2): LNA nucleoside
  modified_base (13)..(15): LNA nucleoside
agcatcagatttcct

SEQ ID NO: 2145 - DNA, 15 bp, Artificial Sequence
  oligonucleotide - internucleotide bonds are phosphorothioate bonds (PS)
  modified_base (1)..(3): LNA nucleoside
  modified_base (12)..(15): LNA nucleoside
agcatcagatttcct

SEQ ID NO: 2146 - DNA, 15 bp, Artificial Sequence
  oligonucleotide - internucleotide bonds are phosphorothioate bonds (PS)
  modified_base (1)..(2): LNA nucleoside
  modified_base (12)..(15): LNA nucleoside
atccaattttatcct

SEQ ID NO: 2147 - DNA, 15 bp, Artificial Sequence
  oligonucleotide - internucleotide bonds are phosphorothioate bonds (PS)
  modified_base (1)..(3): LNA nucleoside
  modified_base (12)..(15): LNA nucleoside
atccaattttatcct

SEQ ID NO: 2148 - DNA, 15 bp, Artificial Sequence
  oligonucleotide - internucleotide bonds are phosphorothioate bonds (PS)
  modified_base (1)..(4): LNA nucleoside
  modified_base (12)..(15): LNA nucleoside
atccaattttatcct

SEQ ID NO: 2149 - DNA, 14 bp, Artificial Sequence
  oligonucleotide - internucleotide bonds are phosphorothioate bonds (PS)
  modified_base (1)..(3): LNA nucleoside
  modified_base (11)..(14): LNA nucleoside
aactgatacatcct

SEQ ID NO: 2150 - DNA, 14 bp, Artificial Sequence
  oligonucleotide - internucleotide bonds are phosphorothioate bonds (PS)
  modified_base (1)..(4): LNA nucleoside
  modified_base (12)..(14): LNA nucleoside
aactgatacatcct

SEQ ID NO: 2151 - DNA, 14 bp, Artificial Sequence
  oligonucleotide - internucleotide bonds are phosphorothioate bonds (PS)
  modified_base (1)..(4): LNA nucleoside
  modified_base (11)..(14): LNA nucleoside
aactgatacatcct

SEQ ID NO: 2152 - DNA, 16 bp, Artificial Sequence
  oligonucleotide - internucleotide bonds are phosphorothioate bonds (PS)
  modified_base (1)..(2): LNA nucleoside
  modified_base (15)..(16): LNA nucleoside
gcctccagctctgcct

SEQ ID NO: 2153 - DNA, 16 bp, Artificial Sequence
  oligonucleotide - internucleotide bonds are phosphorothioate bonds (PS)
  modified_base (1)..(3): LNA nucleoside
  modified_base (15)..(16): LNA nucleoside
gcctccagctctgcct

SEQ ID NO: 2154 - DNA, 16 bp, Artificial Sequence
  oligonucleotide - internucleotide bonds are phosphorothioate bonds (PS)
  modified_base (1)..(2): LNA nucleoside
  modified_base (14)..(16): LNA nucleoside
gcctccagctctgcct

SEQ ID NO: 2155 - DNA, 15 bp, Artificial Sequence
  oligonucleotide - internucleotide bonds are phosphorothioate bonds (PS)
  modified_base (1)..(2): LNA nucleoside
  modified_base (14)..(15): LNA nucleoside
tggtcctgggcccct

SEQ ID NO: 2156 - DNA, 15 bp, Artificial Sequence
  oligonucleotide - internucleotide bonds are phosphorothioate bonds (PS)
  modified_base (1)..(3): LNA nucleoside
  modified_base (14)..(15): LNA nucleoside
tggtcctgggcccct

SEQ ID NO: 2157 - DNA, 15 bp, Artificial Sequence
  oligonucleotide - internucleotide bonds are phosphorothioate bonds (PS)
  modified_base (1)..(2): LNA nucleoside
  modified_base (13)..(15): LNA nucleoside
tggtcctgggcccct

SEQ ID NO: 2158 - DNA, 16 bp, Artificial Sequence
  oligonucleotide - internucleotide bonds are phosphorothioate bonds (PS)
  modified_base (1)..(2): LNA nucleoside
  modified_base (15)..(16): LNA nucleoside
gtggtcctgggcccct

SEQ ID NO: 2159 - DNA, 16 bp, Artificial Sequence
  oligonucleotide - internucleotide bonds are phosphorothioate bonds (PS)
  modified_base (1)..(3): LNA nucleoside
  modified_base (15)..(16): LNA nucleoside
gtggtcctgggcccct

SEQ ID NO: 2160 - DNA, 16 bp, Artificial Sequence
  oligonucleotide - internucleotide bonds are phosphorothioate bonds (PS)
  modified_base (1)..(2): LNA nucleoside
  modified_base (14)..(16): LNA nucleoside
gtggtcctgggcccct

SEQ ID NO: 2161 - DNA, 14 bp, Artificial Sequence
  oligonucleotide - internucleotide bonds are phosphorothioate bonds (PS)
  modified_base (1)..(2): LNA nucleoside
  modified_base (13)..(14): LNA nucleoside
ggcaggagccccct

SEQ ID NO: 2162 - DNA, 14 bp, Artificial Sequence
  oligonucleotide - internucleotide bonds are phosphorothioate bonds (PS)
  modified_base (1)..(2): LNA nucleoside
  modified_base (12)..(14): LNA nucleoside
ggcaggagccccct

SEQ ID NO: 2163 - DNA, 14 bp, Artificial Sequence
  oligonucleotide - internucleotide bonds are phosphorothioate bonds (PS)
  modified_base (1)..(3): LNA nucleoside
  modified_base (13)..(14): LNA nucleoside
ggcaggagccccct

SEQ ID NO: 2164 - DNA, 14 bp, Artificial Sequence
  oligonucleotide - internucleotide bonds are phosphorothioate bonds (PS)
  modified_base (1)..(3): LNA nucleoside
  modified_base (13)..(14): LNA nucleoside
tatgtaaccccact

SEQ ID NO: 2165 - DNA, 14 bp, Artificial Sequence
  oligonucleotide - internucleotide bonds are phosphorothioate bonds (PS)
  modified_base (1)..(4): LNA nucleoside
  modified_base (12)..(14): LNA nucleoside
tatgtaaccccact

SEQ ID NO: 2166 - DNA, 14 bp, Artificial Sequence
  oligonucleotide - internucleotide bonds are phosphorothioate bonds (PS)
  modified_base (1)..(4): LNA nucleoside
  modified_base (11)..(14): LNA nucleoside
tatgtaaccccact

SEQ ID NO: 2167 - DNA, 15 bp, Artificial Sequence
  oligonucleotide - internucleotide bonds are phosphorothioate bonds (PS)
  modified_base (1)..(2): LNA nucleoside
  modified_base (13)..(15): LNA nucleoside
ttatgtaaccccact

SEQ ID NO: 2168 - DNA, 15 bp, Artificial Sequence
  oligonucleotide - internucleotide bonds are phosphorothioate bonds (PS)
  modified_base (1)..(4): LNA nucleoside
  modified_base (14)..(15): LNA nucleoside
ttatgtaaccccact

SEQ ID NO: 2169 - DNA, 15 bp, Artificial Sequence
  oligonucleotide - internucleotide bonds are phosphorothioate bonds (PS)
  modified_base (1)..(4): LNA nucleoside
  modified_base (12)..(15): LNA nucleoside
ttatgtaaccccact

SEQ ID NO: 2170 - DNA, 16 bp, Artificial Sequence
  oligonucleotide - internucleotide bonds are phosphorothioate bonds (PS)
  modified_base (1)..(2): LNA nucleoside
  modified_base (15)..(16): LNA nucleoside
gttatgtaaccccact

SEQ ID NO: 2171 - DNA, 16 bp, Artificial Sequence
  oligonucleotide - internucleotide bonds are phosphorothioate bonds (PS)
  modified_base (1)..(3): LNA nucleoside
  modified_base (15)..(16): LNA nucleoside
gttatgtaaccccact

SEQ ID NO: 2172 - DNA, 16 bp, Artificial Sequence
  oligonucleotide - internucleotide bonds are phosphorothioate bonds (PS)
  modified_base (1)..(4): LNA nucleoside
  modified_base (14)..(16): LNA nucleoside
gttatgtaaccccact

SEQ ID NO: 2173 - DNA, 17 bp, Artificial Sequence
  oligonucleotide - internucleotide bonds are phosphorothioate bonds (PS)
  modified_base (1)..(2): LNA nucleoside
  modified_base (16)..(17): LNA nucleoside
agttatgtaaccccact

SEQ ID NO: 2174 - DNA, 17 bp, Artificial Sequence
  oligonucleotide - internucleotide bonds are phosphorothioate bonds (PS)
  modified_base (1)..(3): LNA nucleoside
  modified_base (16)..(17): LNA nucleoside
agttatgtaaccccact

SEQ ID NO: 2175 - DNA, 17 bp, Artificial Sequence
  oligonucleotide - internucleotide bonds are phosphorothioate bonds (PS)
  modified_base (1)..(2): LNA nucleoside
  modified_base (14)..(17): LNA nucleoside
agttatgtaaccccact

SEQ ID NO: 2176 - DNA, 18 bp, Artificial Sequence
  oligonucleotide - internucleotide bonds are phosphorothioate bonds (PS)
  modified_base (1)..(2): LNA nucleoside
  modified_base (17)..(18): LNA nucleoside
cagttatgtaaccccact

SEQ ID NO: 2177 - DNA, 18 bp, Artificial Sequence
  oligonucleotide - internucleotide bonds are phosphorothioate bonds (PS)
  modified_base (1)..(2): LNA nucleoside
  modified_base (16)..(18): LNA nucleoside
cagttatgtaaccccact

SEQ ID NO: 2178 - DNA, 18 bp, Artificial Sequence
  oligonucleotide - internucleotide bonds are phosphorothioate bonds (PS)
  modified_base (1)..(3): LNA nucleoside
  modified_base (17)..(18): LNA nucleoside
cagttatgtaaccccact

SEQ ID NO: 2179 - DNA, 14 bp, Artificial Sequence
  oligonucleotide - internucleotide bonds are phosphorothioate bonds (PS)
  modified_base (1)..(2): LNA nucleoside
  modified_base (12)..(14): LNA nucleoside
cctgtgactacact

SEQ ID NO: 2180 - DNA, 14 bp, Artificial Sequence
  oligonucleotide - internucleotide bonds are phosphorothioate bonds (PS)
  modified_base (1)..(4): LNA nucleoside
  modified_base (13)..(14): LNA nucleoside
cctgtgactacact

SEQ ID NO: 2181 - DNA, 14 bp, Artificial Sequence
  oligonucleotide - internucleotide bonds are phosphorothioate bonds (PS)
  modified_base (1)..(4): LNA nucleoside
  modified_base (11)..(14): LNA nucleoside
cctgtgactacact

SEQ ID NO: 2182 - DNA, 15 bp, Artificial Sequence
  oligonucleotide - internucleotide bonds are phosphorothioate bonds (PS)
  modified_base (1)..(4): LNA nucleoside
  modified_base (13)..(15): LNA nucleoside
ggaatacttcaaact

SEQ ID NO: 2183 - DNA, 15 bp, Artificial Sequence
  oligonucleotide - internucleotide bonds are phosphorothioate bonds (PS)
  modified_base (1)..(3): LNA nucleoside
  modified_base (12)..(15): LNA nucleoside
ggaatacttcaaact

SEQ ID NO: 2184 - DNA, 15 bp, Artificial Sequence
  oligonucleotide - internucleotide bonds are phosphorothioate bonds (PS)
  modified_base (1)..(4): LNA nucleoside
  modified_base (12)..(15): LNA nucleoside
ggaatacttcaaact

SEQ ID NO: 2185 - DNA, 17 bp, Artificial Sequence
  oligonucleotide - internucleotide bonds are phosphorothioate bonds (PS)
  modified_base (1)..(3): LNA nucleoside
  modified_base (14)..(17): LNA nucleoside
tacattattttgtttat

SEQ ID NO: 2186 - DNA, 17 bp, Artificial Sequence
  oligonucleotide - internucleotide bonds are phosphorothioate bonds (PS)
  modified_base (1)..(4): LNA nucleoside
  modified_base (15)..(17): LNA nucleoside
tacattattttgtttat

SEQ ID NO: 2187 - DNA, 17 bp, Artificial Sequence
  oligonucleotide - internucleotide bonds are phosphorothioate bonds (PS)
  modified_base (1)..(4): LNA nucleoside
  modified_base (14)..(17): LNA nucleoside
tacattattttgtttat

SEQ ID NO: 2188 - DNA, 14 bp, Artificial Sequence
  oligonucleotide - internucleotide bonds are phosphorothioate bonds (PS)
  modified_base (1)..(3): LNA nucleoside
  modified_base (11)..(14): LNA nucleoside
cggcaaacatttat

SEQ ID NO: 2189 - DNA, 14 bp, Artificial Sequence
  oligonucleotide - internucleotide bonds are phosphorothioate bonds (PS)
  modified_base (1)..(4): LNA nucleoside
  modified_base (12)..(14): LNA nucleoside
cggcaaacatttat

SEQ ID NO: 2190 - DNA, 14 bp, Artificial Sequence
  oligonucleotide - internucleotide bonds are phosphorothioate bonds (PS)
  modified_base (1)..(4): LNA nucleoside
  modified_base (11)..(14): LNA nucleoside
cggcaaacatttat

SEQ ID NO: 2191 - DNA, 14 bp, Artificial Sequence
  oligonucleotide - internucleotide bonds are phosphorothioate bonds (PS)
  modified_base (1)..(2): LNA nucleoside
  modified_base (13)..(14): LNA nucleoside
tgccatgctcctat

SEQ ID NO: 2192 - DNA, 14 bp, Artificial Sequence
  oligonucleotide - internucleotide bonds are phosphorothioate bonds (PS)
  modified_base (1)..(3): LNA nucleoside
  modified_base (13)..(14): LNA nucleoside
tgccatgctcctat

SEQ ID NO: 2193 - DNA, 14 bp, Artificial Sequence
  oligonucleotide - internucleotide bonds are phosphorothioate bonds (PS)
  modified_base (1)..(4): LNA nucleoside
  modified_base (13)..(14): LNA nucleoside
tgccatgctcctat

SEQ ID NO: 2194 - DNA, 14 bp, Artificial Sequence
  oligonucleotide - internucleotide bonds are phosphorothioate bonds (PS)
  modified_base (1)..(4): LNA nucleoside
  modified_base (12)..(14): LNA nucleoside
tcaattgatcatat

SEQ ID NO: 2195 - DNA, 14 bp, Artificial Sequence
  oligonucleotide - internucleotide bonds are phosphorothioate bonds (PS)
  modified_base (1)..(3): LNA nucleoside
  modified_base (11)..(14): LNA nucleoside
tcaattgatcatat

SEQ ID NO: 2196 - DNA, 14 bp, Artificial Sequence
  oligonucleotide - internucleotide bonds are phosphorothioate bonds (PS)
  modified_base (1)..(4): LNA nucleoside
  modified_base (11)..(14): LNA nucleoside
tcaattgatcatat

SEQ ID NO: 2197 - DNA, 15 bp, Artificial Sequence
  oligonucleotide - internucleotide bonds are phosphorothioate bonds (PS)
  modified_base (1)..(3): LNA nucleoside
  modified_base (12)..(15): LNA nucleoside
atcaattgatcatat

SEQ ID NO: 2198 - DNA, 15 bp, Artificial Sequence
  oligonucleotide - internucleotide bonds are phosphorothioate bonds (PS)
  modified_base (1)..(4): LNA nucleoside
  modified_base (13)..(15): LNA nucleoside
atcaattgatcatat

SEQ ID NO: 2199 - DNA, 15 bp, Artificial Sequence
  oligonucleotide - internucleotide bonds are phosphorothioate bonds (PS)
  modified_base (1)..(4): LNA nucleoside
  modified_base (12)..(15): LNA nucleoside
atcaattgatcatat

SEQ ID NO: 2200 - DNA, 15 bp, Artificial Sequence
  oligonucleotide - internucleotide bonds are phosphorothioate bonds (PS)
  modified_base (1)..(3): LNA nucleoside
  modified_base (12)..(15): LNA nucleoside
attcattacacatat

SEQ ID NO: 2201 - DNA, 15 bp, Artificial Sequence
  oligonucleotide - internucleotide bonds are phosphorothioate bonds (PS)
  modified_base (1)..(4): LNA nucleoside
  modified_base (13)..(15): LNA nucleoside
attcattacacatat

SEQ ID NO: 2202 - DNA, 15 bp, Artificial Sequence
  oligonucleotide - internucleotide bonds are phosphorothioate bonds (PS)
  modified_base (1)..(4): LNA nucleoside
  modified_base (12)..(15): LNA nucleoside
attcattacacatat

SEQ ID NO: 2203 - DNA, 14 bp, Artificial Sequence
  oligonucleotide - internucleotide bonds are phosphorothioate bonds (PS)
  modified_base (1)..(4): LNA nucleoside
  modified_base (12)..(14): LNA nucleoside
tttgtatattggat

SEQ ID NO: 2204 - DNA, 14 bp, Artificial Sequence
  oligonucleotide - internucleotide bonds are phosphorothioate bonds (PS)
  modified_base (1)..(3): LNA nucleoside
  modified_base (11)..(14): LNA nucleoside
tttgtatattggat

SEQ ID NO: 2205 - DNA, 14 bp, Artificial Sequence
  oligonucleotide - internucleotide bonds are phosphorothioate bonds (PS)
  modified_base (1)..(4): LNA nucleoside
  modified_base (11)..(14): LNA nucleoside
tttgtatattggat

SEQ ID NO: 2206 - DNA, 14 bp, Artificial Sequence
  oligonucleotide - internucleotide bonds are phosphorothioate bonds (PS)
  modified_base (1)..(4): LNA nucleoside
  modified_base (13)..(14): LNA nucleoside
catgccaagaggat

SEQ ID NO: 2207 - DNA, 14 bp, Artificial Sequence
  oligonucleotide - internucleotide bonds are phosphorothioate bonds (PS)
  modified_base (1)..(4): LNA nucleoside
  modified_base (12)..(14): LNA nucleoside
catgccaagaggat

SEQ ID NO: 2208 - DNA, 14 bp, Artificial Sequence
  oligonucleotide - internucleotide bonds are phosphorothioate bonds (PS)
  modified_base (1)..(4): LNA nucleoside
  modified_base (11)..(14): LNA nucleoside
catgccaagaggat

SEQ ID NO: 2209 - DNA, 15 bp, Artificial Sequence
  oligonucleotide - internucleotide bonds are phosphorothioate bonds (PS)
  modified_base (1)..(3): LNA nucleoside
  modified_base (12)..(15): LNA nucleoside
ttccagggaaaagat

SEQ ID NO: 2210 - DNA, 15 bp, Artificial Sequence
  oligonucleotide - internucleotide bonds are phosphorothioate bonds (PS)
  modified_base (1)..(4): LNA nucleoside
  modified_base (13)..(15): LNA nucleoside
ttccagggaaaagat

SEQ ID NO: 2211 - DNA, 15 bp, Artificial Sequence
  oligonucleotide - internucleotide bonds are phosphorothioate bonds (PS)
  modified_base (1)..(4): LNA nucleoside
  modified_base (12)..(15): LNA nucleoside
ttccagggaaaagat

SEQ ID NO: 2212 - DNA, 15 bp, Artificial Sequence
  oligonucleotide - internucleotide bonds are phosphorothioate bonds (PS)
  modified_base (1)..(3): LNA nucleoside
  modified_base (14)..(15): LNA nucleoside
gaacctggaggtcat

SEQ ID NO: 2213 - DNA, 15 bp, Artificial Sequence
  oligonucleotide - internucleotide bonds are phosphorothioate bonds (PS)
  modified_base (1)..(3): LNA nucleoside
  modified_base (13)..(15): LNA nucleoside
gaacctggaggtcat

SEQ ID NO: 2214 - DNA, 15 bp, Artificial Sequence
  oligonucleotide - internucleotide bonds are phosphorothioate bonds (PS)
  modified_base (1)..(4): LNA nucleoside
  modified_base (12)..(15): LNA nucleoside
gaacctggaggtcat

SEQ ID NO: 2215 - DNA, 14 bp, Artificial Sequence
  oligonucleotide - internucleotide bonds are phosphorothioate bonds (PS)
  modified_base (1)..(3): LNA nucleoside
  modified_base (11)..(14): LNA nucleoside
ttactcatactcat

SEQ ID NO: 2216 - DNA, 14 bp, Artificial Sequence
  oligonucleotide - internucleotide bonds are phosphorothioate bonds (PS)
  modified_base (1)..(4): LNA nucleoside
  modified_base (12)..(14): LNA nucleoside
ttactcatactcat

SEQ ID NO: 2217 - DNA, 14 bp, Artificial Sequence
  oligonucleotide - internucleotide bonds are phosphorothioate bonds (PS)
  modified_base (1)..(4): LNA nucleoside
  modified_base (11)..(14): LNA nucleoside
ttactcatactcat

SEQ ID NO: 2218 - DNA, 15 bp, Artificial Sequence
  oligonucleotide - internucleotide bonds are phosphorothioate bonds (PS)
  modified_base (1)..(4): LNA nucleoside
  modified_base (13)..(15): LNA nucleoside
atatcttatatccat

SEQ ID NO: 2219 - DNA, 15 bp, Artificial Sequence
  oligonucleotide - internucleotide bonds are phosphorothioate bonds (PS)
  modified_base (1)..(3): LNA nucleoside
  modified_base (12)..(15): LNA nucleoside
atatcttatatccat

SEQ ID NO: 2220 - DNA, 15 bp, Artificial Sequence
  oligonucleotide - internucleotide bonds are phosphorothioate bonds (PS)
  modified_base (1)..(4): LNA nucleoside
  modified_base (12)..(15): LNA nucleoside
atatcttatatccat

SEQ ID NO: 2221 - DNA, 15 bp, Artificial Sequence
  oligonucleotide - internucleotide bonds are phosphorothioate bonds (PS)
  modified_base (1)..(2): LNA nucleoside
  modified_base (14)..(15): LNA nucleoside
accccctccccacat

SEQ ID NO: 2222 - DNA, 15 bp, Artificial Sequence
  oligonucleotide - internucleotide bonds are phosphorothioate bonds (PS)
  modified_base (1)..(2): LNA nucleoside
  modified_base (13)..(15): LNA nucleoside
accccctccccacat

SEQ ID NO: 2223 - DNA, 15 bp, Artificial Sequence
  oligonucleotide - internucleotide bonds are phosphorothioate bonds (PS)
  modified_base (1)..(3): LNA nucleoside
  modified_base (14)..(15): LNA nucleoside
accccctccccacat

SEQ ID NO: 2224 - DNA, 16 bp, Artificial Sequence
  oligonucleotide - internucleotide bonds are phosphorothioate bonds (PS)
  modified_base (1)..(2): LNA nucleoside
  modified_base (15)..(16): LNA nucleoside
aaccccctccccacat

SEQ ID NO: 2225 - DNA, 16 bp, Artificial Sequence
  oligonucleotide - internucleotide bonds are phosphorothioate bonds (PS)
  modified_base (1)..(3): LNA nucleoside
  modified_base (15)..(16): LNA nucleoside
aaccccctccccacat

SEQ ID NO: 2226 - DNA, 16 bp, Artificial Sequence
  oligonucleotide - internucleotide bonds are phosphorothioate bonds (PS)
  modified_base (1)..(2): LNA nucleoside
  modified_base (14)..(16): LNA nucleoside
aaccccctccccacat

SEQ ID NO: 2227 - DNA, 15 bp, Artificial Sequence
  oligonucleotide - internucleotide bonds are phosphorothioate bonds (PS)
  modified_base (1)..(4): LNA nucleoside
  modified_base (13)..(15): LNA nucleoside
tgggaaatgggtaat

SEQ ID NO: 2228 - DNA, 15 bp, Artificial Sequence
  oligonucleotide - internucleotide bonds are phosphorothioate bonds (PS)
  modified_base (1)..(3): LNA nucleoside
  modified_base (12)..(15): LNA nucleoside
tgggaaatgggtaat

SEQ ID NO: 2229 - DNA, 15 bp, Artificial Sequence
  oligonucleotide - internucleotide bonds are phosphorothioate bonds (PS)
  modified_base (1)..(4): LNA nucleoside
  modified_base (12)..(15): LNA nucleoside
tgggaaatgggtaat

SEQ ID NO: 2230 - DNA, 16 bp, Artificial Sequence
  oligonucleotide - internucleotide bonds are phosphorothioate bonds (PS)
  modified_base (1)..(3): LNA nucleoside
  modified_base (14)..(16): LNA nucleoside
ctgggaaatgggtaat

SEQ ID NO: 2231 - DNA, 16 bp, Artificial Sequence
  oligonucleotide - internucleotide bonds are phosphorothioate bonds (PS)
  modified_base (1)..(4): LNA nucleoside
  modified_base (14)..(16): LNA nucleoside
ctgggaaatgggtaat

SEQ ID NO: 2232 - DNA, 16 bp, Artificial Sequence
  oligonucleotide - internucleotide bonds are phosphorothioate bonds (PS)
  modified_base (1)..(4): LNA nucleoside
  modified_base (13)..(16): LNA nucleoside
ctgggaaatgggtaat

SEQ ID NO: 2233 - DNA, 14 bp, Artificial Sequence
  oligonucleotide - internucleotide bonds are phosphorothioate bonds (PS)
  modified_base (1)..(4): LNA nucleoside
  modified_base (12)..(14): LNA nucleoside
actctctagagaat

SEQ ID NO: 2234 - DNA, 14 bp, Artificial Sequence
  oligonucleotide - internucleotide bonds are phosphorothioate bonds (PS)
  modified_base (1)..(3): LNA nucleoside
  modified_base (11)..(14): LNA nucleoside
actctctagagaat

SEQ ID NO: 2235 - DNA, 14 bp, Artificial Sequence
  oligonucleotide - internucleotide bonds are phosphorothioate bonds (PS)
  modified_base (1)..(4): LNA nucleoside
  modified_base (11)..(14): LNA nucleoside
actctctagagaat

SEQ ID NO: 2236 - DNA, 15 bp, Artificial Sequence
  oligonucleotide - internucleotide bonds are phosphorothioate bonds (PS)
  modified_base (1)..(2): LNA nucleoside
  modified_base (12)..(15): LNA nucleoside
ttttccttgtacaat

SEQ ID NO: 2237 - DNA, 15 bp, Artificial Sequence
  oligonucleotide - internucleotide bonds are phosphorothioate bonds (PS)
  modified_base (1)..(3): LNA nucleoside
  modified_base (12)..(15): LNA nucleoside
ttttccttgtacaat

SEQ ID NO: 2238 - DNA, 15 bp, Artificial Sequence
  oligonucleotide - internucleotide bonds are phosphorothioate bonds (PS)
  modified_base (1)..(4): LNA nucleoside
  modified_base (12)..(15): LNA nucleoside
ttttccttgtacaat

SEQ ID NO: 2239 - DNA, 16 bp, Artificial Sequence
  oligonucleotide - internucleotide bonds are phosphorothioate bonds (PS)
  modified_base (1)..(2): LNA nucleoside
  modified_base (13)..(16): LNA nucleoside
attttccttgtacaat

SEQ ID NO: 2240 - DNA, 16 bp, Artificial Sequence
  oligonucleotide - internucleotide bonds are phosphorothioate bonds (PS)
  modified_base (1)..(3): LNA nucleoside
  modified_base (13)..(16): LNA nucleoside
attttccttgtacaat

SEQ ID NO: 2241 - DNA, 16 bp, Artificial Sequence
  oligonucleotide - internucleotide bonds are phosphorothioate bonds (PS)
  modified_base (1)..(4): LNA nucleoside
  modified_base (13)..(16): LNA nucleoside
attttccttgtacaat

SEQ ID NO: 2242 - DNA, 17 bp, Artificial Sequence
  oligonucleotide - internucleotide bonds are phosphorothioate bonds (PS)
  modified_base (1)..(2): LNA nucleoside
  modified_base (14)..(17): LNA nucleoside
aattttccttgtacaat

SEQ ID NO: 2243 - DNA, 17 bp, Artificial Sequence
  oligonucleotide - internucleotide bonds are phosphorothioate bonds (PS)
  modified_base (1)..(3): LNA nucleoside
  modified_base (14)..(17): LNA nucleoside
aattttccttgtacaat

SEQ ID NO: 2244 - DNA, 17 bp, Artificial Sequence
  oligonucleotide - internucleotide bonds are phosphorothioate bonds (PS)
  modified_base (1)..(4): LNA nucleoside
  modified_base (14)..(17): LNA nucleoside
aattttccttgtacaat

SEQ ID NO: 2245 - DNA, 18 bp, Artificial Sequence
  oligonucleotide - internucleotide bonds are phosphorothioate bonds (PS)
  modified_base (1)..(4): LNA nucleoside
  modified_base (16)..(18): LNA nucleoside
taattttccttgtacaat

SEQ ID NO: 2246 - DNA, 18 bp, Artificial Sequence
  oligonucleotide - internucleotide bonds are phosphorothioate bonds (PS)
  modified_base (1)..(3): LNA nucleoside
  modified_base (15)..(18): LNA nucleoside
taattttccttgtacaat

SEQ ID NO: 2247 - DNA, 18 bp, Artificial Sequence
  oligonucleotide - internucleotide bonds are phosphorothioate bonds (PS)
  modified_base (1)..(4): LNA nucleoside
  modified_base (15)..(18): LNA nucleoside
taattttccttgtacaat

SEQ ID NO: 2248 - DNA, 19 bp, Artificial Sequence
  oligonucleotide - internucleotide bonds are phosphorothioate bonds (PS)
  modified_base (1)..(2): LNA nucleoside
  modified_base (18)..(19): LNA nucleoside
ctaattttccttgtacaat

SEQ ID NO: 2249 - DNA, 19 bp, Artificial Sequence
  oligonucleotide - internucleotide bonds are phosphorothioate bonds (PS)
  modified_base (1)..(4): LNA nucleoside
  modified_base (17)..(19): LNA nucleoside
ctaattttccttgtacaat

SEQ ID NO: 2250 - DNA, 19 bp, Artificial Sequence
  oligonucleotide - internucleotide bonds are phosphorothioate bonds (PS)
  modified_base (1)..(4): LNA nucleoside
  modified_base (16)..(19): LNA nucleoside
ctaattttccttgtacaat

SEQ ID NO: 2251 - DNA, 15 bp, Artificial Sequence
  oligonucleotide - internucleotide bonds are phosphorothioate bonds (PS)
  modified_base (1)..(3): LNA nucleoside
  modified_base (14)..(15): LNA nucleoside
tctcttgcctcaaat

SEQ ID NO: 2252 - DNA, 15 bp, Artificial Sequence
  oligonucleotide - internucleotide bonds are phosphorothioate bonds (PS)
  modified_base (1)..(4): LNA nucleoside
  modified_base (14)..(15): LNA nucleoside
tctcttgcctcaaat

SEQ ID NO: 2253 - DNA, 15 bp, Artificial Sequence
  oligonucleotide - internucleotide bonds are phosphorothioate bonds (PS)
  modified_base (1)..(4): LNA nucleoside
  modified_base (12)..(15): LNA nucleoside
tctcttgcctcaaat

SEQ ID NO: 2254 - DNA, 16 bp, Artificial Sequence
  oligonucleotide - internucleotide bonds are phosphorothioate bonds (PS)
  modified_base (1)..(4): LNA nucleoside
  modified_base (15)..(16): LNA nucleoside
atatacatttacaaat

SEQ ID NO: 2255 - DNA, 16 bp, Artificial Sequence
  oligonucleotide - internucleotide bonds are phosphorothioate bonds (PS)
  modified_base (1)..(4): LNA nucleoside
  modified_base (14)..(16): LNA nucleoside
atatacatttacaaat

SEQ ID NO: 2256 - DNA, 16 bp, Artificial Sequence
  oligonucleotide - internucleotide bonds are phosphorothioate bonds (PS)
  modified_base (1)..(4): LNA nucleoside
  modified_base (13)..(16): LNA nucleoside
atatacatttacaaat

SEQ ID NO: 2257 - DNA, 14 bp, Artificial Sequence
  oligonucleotide - internucleotide bonds are phosphorothioate bonds (PS)
  modified_base (1)..(3): LNA nucleoside
  modified_base (11)..(14): LNA nucleoside
accttagacatttg

SEQ ID NO: 2258 - DNA, 14 bp, Artificial Sequence
  oligonucleotide - internucleotide bonds are phosphorothioate bonds (PS)
  modified_base (1)..(4): LNA nucleoside
  modified_base (12)..(14): LNA nucleoside
accttagacatttg

SEQ ID NO: 2259 - DNA, 14 bp, Artificial Sequence
  oligonucleotide - internucleotide bonds are phosphorothioate bonds (PS)
  modified_base (1)..(4): LNA nucleoside
  modified_base (11)..(14): LNA nucleoside
accttagacatttg

SEQ ID NO: 2260 - DNA, 15 bp, Artificial Sequence
  oligonucleotide - internucleotide bonds are phosphorothioate bonds (PS)
  modified_base (1)..(2): LNA nucleoside
  modified_base (14)..(15): LNA nucleoside
ttgacctcagctctg

SEQ ID NO: 2261 - DNA, 15 bp, Artificial Sequence
  oligonucleotide - internucleotide bonds are phosphorothioate bonds (PS)
  modified_base (1)..(3): LNA nucleoside
  modified_base (13)..(15): LNA nucleoside
ttgacctcagctctg

SEQ ID NO: 2262 - DNA, 15 bp, Artificial Sequence
  oligonucleotide - internucleotide bonds are phosphorothioate bonds (PS)
  modified_base (1)..(4): LNA nucleoside
  modified_base (13)..(15): LNA nucleoside
ttgacctcagctctg

SEQ ID NO: 2263 - DNA, 15 bp, Artificial Sequence
  oligonucleotide - internucleotide bonds are phosphorothioate bonds (PS)
  modified_base (1)..(3): LNA nucleoside
  modified_base (14)..(15): LNA nucleoside
ttctttctgtggctg

SEQ ID NO: 2264 - DNA, 15 bp, Artificial Sequence
  oligonucleotide - internucleotide bonds are phosphorothioate bonds (PS)
  modified_base (1)..(3): LNA nucleoside
  modified_base (13)..(15): LNA nucleoside
ttctttctgtggctg

SEQ ID NO: 2265 - DNA, 15 bp, Artificial Sequence
  oligonucleotide - internucleotide bonds are phosphorothioate bonds (PS)
  modified_base (1)..(3): LNA nucleoside
  modified_base (12)..(15): LNA nucleoside
ttctttctgtggctg

SEQ ID NO: 2266 - DNA, 14 bp, Artificial Sequence
  oligonucleotide - internucleotide bonds are phosphorothioate bonds (PS)
  modified_base (1)..(3): LNA nucleoside
  modified_base (13)..(14): LNA nucleoside
acaatctagccctg

SEQ ID NO: 2267 - DNA, 14 bp, Artificial Sequence
  oligonucleotide - internucleotide bonds are phosphorothioate bonds (PS)
  modified_base (1)..(4): LNA nucleoside
  modified_base (12)..(14): LNA nucleoside
acaatctagccctg

SEQ ID NO: 2268 - DNA, 14 bp, Artificial Sequence
  oligonucleotide - internucleotide bonds are phosphorothioate bonds (PS)
  modified_base (1)..(4): LNA nucleoside
  modified_base (11)..(14): LNA nucleoside
acaatctagccctg

SEQ ID NO: 2269 - DNA, 16 bp, Artificial Sequence
  oligonucleotide - internucleotide bonds are phosphorothioate bonds (PS)
  modified_base (1)..(4): LNA nucleoside
  modified_base (14)..(16): LNA nucleoside
cattattttgtttatg

SEQ ID NO: 2270 - DNA, 16 bp, Artificial Sequence
  oligonucleotide - internucleotide bonds are phosphorothioate bonds (PS)
  modified_base (1)..(3): LNA nucleoside
  modified_base (13)..(16): LNA nucleoside
cattattttgtttatg

SEQ ID NO: 2271 - DNA, 16 bp, Artificial Sequence
  oligonucleotide - internucleotide bonds are phosphorothioate bonds (PS)
  modified_base (1)..(4): LNA nucleoside
  modified_base (13)..(16): LNA nucleoside
cattattttgtttatg

SEQ ID NO: 2272 - DNA, 17 bp, Artificial Sequence
  oligonucleotide - internucleotide bonds are phosphorothioate bonds (PS)
  modified_base (1)..(4): LNA nucleoside
  modified_base (15)..(17): LNA nucleoside
acattattttgtttatg

SEQ ID NO: 2273 - DNA, 17 bp, Artificial Sequence
  oligonucleotide - internucleotide bonds are phosphorothioate bonds (PS)
  modified_base (1)..(3): LNA nucleoside
  modified_base (14)..(17): LNA nucleoside
acattattttgtttatg

SEQ ID NO: 2274 - DNA, 17 bp, Artificial Sequence
  oligonucleotide - internucleotide bonds are phosphorothioate bonds (PS)
  modified_base (1)..(4): LNA nucleoside
  modified_base (14)..(17): LNA nucleoside
acattattttgtttatg

SEQ ID NO: 2275 - DNA, 18 bp, Artificial Sequence
  oligonucleotide - internucleotide bonds are phosphorothioate bonds (PS)
  modified_base (1)..(4): LNA nucleoside
  modified_base (16)..(18): LNA nucleoside
tacattattttgtttatg

SEQ ID NO: 2276 - DNA, 18 bp, Artificial Sequence
  oligonucleotide - internucleotide bonds are phosphorothioate bonds (PS)
  modified_base (1)..(3): LNA nucleoside
  modified_base (15)..(18): LNA nucleoside
tacattattttgtttatg

SEQ ID NO: 2277 - DNA, 18 bp, Artificial Sequence
  oligonucleotide - internucleotide bonds are phosphorothioate bonds (PS)
  modified_base (1)..(4): LNA nucleoside
  modified_base (15)..(18): LNA nucleoside
tacattattttgtttatg

SEQ ID NO: 2278 - DNA, 14 bp, Artificial Sequence
  oligonucleotide - internucleotide bonds are phosphorothioate bonds (PS)
  modified_base (1)..(2): LNA nucleoside
  modified_base (13)..(14): LNA nucleoside
gccatgctcctatg

SEQ ID NO: 2279 - DNA, 14 bp, Artificial Sequence
  oligonucleotide - internucleotide bonds are phosphorothioate bonds (PS)
  modified_base (1)..(3): LNA nucleoside
  modified_base (13)..(14): LNA nucleoside
gccatgctcctatg

SEQ ID NO: 2280 - DNA, 14 bp, Artificial Sequence
  oligonucleotide - internucleotide bonds are phosphorothioate bonds (PS)
  modified_base (1)..(4): LNA nucleoside
  modified_base (13)..(14): LNA nucleoside
gccatgctcctatg

SEQ ID NO: 2281 - DNA, 15 bp, Artificial Sequence
  oligonucleotide - internucleotide bonds are phosphorothioate bonds (PS)
  modified_base (1)..(2): LNA nucleoside
  modified_base (14)..(15): LNA nucleoside
tgccatgctcctatg

SEQ ID NO: 2282 - DNA, 15 bp, Artificial Sequence
  oligonucleotide - internucleotide bonds are phosphorothioate bonds (PS)
  modified_base (1)..(2): LNA nucleoside
  modified_base (13)..(15): LNA nucleoside
tgccatgctcctatg

SEQ ID NO: 2283 - DNA, 15 bp, Artificial Sequence
  oligonucleotide - internucleotide bonds are phosphorothioate bonds (PS)
  modified_base (1)..(3): LNA nucleoside
  modified_base (13)..(15): LNA nucleoside
tgccatgctcctatg

SEQ ID NO: 2284 - DNA, 14 bp, Artificial Sequence
  oligonucleotide - internucleotide bonds are phosphorothioate bonds (PS)
  modified_base (1)..(3): LNA nucleoside
  modified_base (13)..(14): LNA nucleoside
tcatcacacccatg

SEQ ID NO: 2285 - DNA, 14 bp, Artificial Sequence
  oligonucleotide - internucleotide bonds are phosphorothioate bonds (PS)
  modified_base (1)..(4): LNA nucleoside
  modified_base (12)..(14): LNA nucleoside
tcatcacacccatg

SEQ ID NO: 2286 - DNA, 14 bp, Artificial Sequence
  oligonucleotide - internucleotide bonds are phosphorothioate bonds (PS)
  modified_base (1)..(4): LNA nucleoside
  modified_base (11)..(14): LNA nucleoside
tcatcacacccatg

SEQ ID NO: 2287 - DNA, 15 bp, Artificial Sequence
  oligonucleotide - internucleotide bonds are phosphorothioate bonds (PS)
  modified_base (1)..(3): LNA nucleoside
  modified_base (12)..(15): LNA nucleoside
ttttaatgtttttgg

SEQ ID NO: 2288 - DNA, 15 bp, Artificial Sequence
  oligonucleotide - internucleotide bonds are phosphorothioate bonds (PS)
  modified_base (1)..(4): LNA nucleoside
  modified_base (13)..(15): LNA nucleoside
ttttaatgtttttgg

SEQ ID NO: 2289 - DNA, 15 bp, Artificial Sequence
  oligonucleotide - internucleotide bonds are phosphorothioate bonds (PS)
  modified_base (1)..(4): LNA nucleoside
  modified_base (12)..(15): LNA nucleoside
ttttaatgtttttgg

SEQ ID NO: 2290 - DNA, 14 bp, Artificial Sequence
  oligonucleotide - internucleotide bonds are phosphorothioate bonds (PS)
  modified_base (1)..(3): LNA nucleoside
  modified_base (13)..(14): LNA nucleoside
ttctgagggcttgg

SEQ ID NO: 2291 - DNA, 14 bp, Artificial Sequence
  oligonucleotide - internucleotide bonds are phosphorothioate bonds (PS)
  modified_base (1)..(3): LNA nucleoside
  modified_base (12)..(14): LNA nucleoside
ttctgagggcttgg

SEQ ID NO: 2292 - DNA, 14 bp, Artificial Sequence
  oligonucleotide - internucleotide bonds are phosphorothioate bonds (PS)
  modified_base (1)..(4): LNA nucleoside
  modified_base (11)..(14): LNA nucleoside
ttctgagggcttgg

SEQ ID NO: 2293 - DNA, 17 bp, Artificial Sequence
  oligonucleotide - internucleotide bonds are phosphorothioate bonds (PS)
  modified_base (1)..(2): LNA nucleoside
  modified_base (16)..(17): LNA nucleoside
ggtgtgtgtgggtgtgg

SEQ ID NO: 2294 - DNA, 17 bp, Artificial Sequence
  oligonucleotide - internucleotide bonds are phosphorothioate bonds (PS)
  modified_base (1)..(3): LNA nucleoside
  modified_base (16)..(17): LNA nucleoside
ggtgtgtgtgggtgtgg

SEQ ID NO: 2295 - DNA, 17 bp, Artificial Sequence
  oligonucleotide - internucleotide bonds are phosphorothioate bonds (PS)
  modified_base (1)..(2): LNA nucleoside
  modified_base (15)..(17): LNA nucleoside
ggtgtgtgtgggtgtgg

SEQ ID NO: 2296 - DNA, 14 bp, Artificial Sequence
  oligonucleotide - internucleotide bonds are phosphorothioate bonds (PS)
  modified_base (1)..(2): LNA nucleoside
  modified_base (13)..(14): LNA nucleoside
atattgggccctgg

SEQ ID NO: 2297 - DNA, 14 bp, Artificial Sequence
  oligonucleotide - internucleotide bonds are phosphorothioate bonds (PS)
  modified_base (1)..(4): LNA nucleoside
  modified_base (13)..(14): LNA nucleoside
atattgggccctgg

SEQ ID NO: 2298 - DNA, 14 bp, Artificial Sequence
  oligonucleotide - internucleotide bonds are phosphorothioate bonds (PS)
  modified_base (1)..(3): LNA nucleoside
  modified_base (11)..(14): LNA nucleoside
atattgggccctgg

SEQ ID NO: 2299 - DNA, 14 bp, Artificial Sequence
  oligonucleotide - internucleotide bonds are phosphorothioate bonds (PS)
  modified_base (1)..(2): LNA nucleoside
  modified_base (13)..(14): LNA nucleoside
catcacacccatgg

SEQ ID NO: 2300 - DNA, 14 bp, Artificial Sequence
  oligonucleotide - internucleotide bonds are phosphorothioate bonds (PS)
  modified_base (1)..(4): LNA nucleoside
  modified_base (13)..(14): LNA nucleoside
catcacacccatgg

SEQ ID NO: 2301 - DNA, 14 bp, Artificial Sequence
  oligonucleotide - internucleotide bonds are phosphorothioate bonds (PS)
  modified_base (1)..(4): LNA nucleoside
  modified_base (11)..(14): LNA nucleoside
catcacacccatgg

SEQ ID NO: 2302 - DNA, 15 bp, Artificial Sequence
  oligonucleotide - internucleotide bonds are phosphorothioate bonds (PS)
  modified_base (1)..(2): LNA nucleoside
  modified_base (14)..(15): LNA nucleoside
tcatcacacccatgg

SEQ ID NO: 2303 - DNA, 15 bp, Artificial Sequence
  oligonucleotide - internucleotide bonds are phosphorothioate bonds (PS)
  modified_base (1)..(2): LNA nucleoside
  modified_base (12)..(15): LNA nucleoside
tcatcacacccatgg

SEQ ID NO: 2304 - DNA, 15 bp, Artificial Sequence
  oligonucleotide - internucleotide bonds are phosphorothioate bonds (PS)
  modified_base (1)..(4): LNA nucleoside
  modified_base (13)..(15): LNA nucleoside
tcatcacacccatgg

SEQ ID NO: 2305 - DNA, 14 bp, Artificial Sequence
  oligonucleotide - internucleotide bonds are phosphorothioate bonds (PS)
  modified_base (1)..(2): LNA nucleoside
  modified_base (11)..(14): LNA nucleoside
ttaatgtttttggg

SEQ ID NO: 2306 - DNA, 14 bp, Artificial Sequence
  oligonucleotide - internucleotide bonds are phosphorothioate bonds (PS)
  modified_base (1)..(3): LNA nucleoside
  modified_base (11)..(14): LNA nucleoside
ttaatgtttttggg

SEQ ID NO: 2307 - DNA, 14 bp, Artificial Sequence
  oligonucleotide - internucleotide bonds are phosphorothioate bonds (PS)
  modified_base (1)..(4): LNA nucleoside
  modified_base (11)..(14): LNA nucleoside
ttaatgtttttggg

SEQ ID NO: 2308 - DNA, 15 bp, Artificial Sequence
  oligonucleotide - internucleotide bonds are phosphorothioate bonds (PS)
  modified_base (1)..(4): LNA nucleoside
  modified_base (13)..(15): LNA nucleoside
tttaatgtttttggg

SEQ ID NO: 2309 - DNA, 15 bp, Artificial Sequence
  oligonucleotide - internucleotide bonds are phosphorothioate bonds (PS)
  modified_base (1)..(3): LNA nucleoside
  modified_base (12)..(15): LNA nucleoside
tttaatgtttttggg

SEQ ID NO: 2310 - DNA, 15 bp, Artificial Sequence
  oligonucleotide - internucleotide bonds are phosphorothioate bonds (PS)
  modified_base (1)..(4): LNA nucleoside
  modified_base (12)..(15): LNA nucleoside
tttaatgtttttggg

SEQ ID NO: 2311 - DNA, 16 bp, Artificial Sequence
  oligonucleotide - internucleotide bonds are phosphorothioate bonds (PS)
  modified_base (1)..(4): LNA nucleoside
  modified_base (14)..(16): LNA nucleoside
ttttaatgtttttggg

SEQ ID NO: 2312 - DNA, 16 bp, Artificial Sequence
  oligonucleotide - internucleotide bonds are phosphorothioate bonds (PS)
  modified_base (1)..(3): LNA nucleoside
  modified_base (13)..(16): LNA nucleoside
ttttaatgtttttggg

SEQ ID NO: 2313 - DNA, 16 bp, Artificial Sequence
  oligonucleotide - internucleotide bonds are phosphorothioate bonds (PS)
  modified_base (1)..(4): LNA nucleoside
  modified_base (13)..(16): LNA nucleoside
ttttaatgtttttggg

SEQ ID NO: 2314 - DNA, 14 bp, Artificial Sequence
  oligonucleotide - internucleotide bonds are phosphorothioate bonds (PS)
  modified_base (1)..(2): LNA nucleoside
  modified_base (13)..(14): LNA nucleoside
tgtgtgtccaaggg

SEQ ID NO: 2315 - DNA, 14 bp, Artificial Sequence
  oligonucleotide - internucleotide bonds are phosphorothioate bonds (PS)
  modified_base (1)..(4): LNA nucleoside
  modified_base (13)..(14): LNA nucleoside
tgtgtgtccaaggg

SEQ ID NO: 2316 - DNA, 14 bp, Artificial Sequence
  oligonucleotide - internucleotide bonds are phosphorothioate bonds (PS)
  modified_base (1)..(3): LNA nucleoside
  modified_base (11)..(14): LNA nucleoside
tgtgtgtccaaggg

SEQ ID NO: 2317 - DNA, 14 bp, Artificial Sequence
  oligonucleotide - internucleotide bonds are phosphorothioate bonds (PS)
  modified_base (1)..(2): LNA nucleoside
  modified_base (13)..(14): LNA nucleoside
  modified_base (10)..(10): 5-methyl cytosine
  modified_base (12)..(12): 5-methyl cytosine
ccagctggacgcgg

SEQ ID NO: 2318 - DNA, 14 bp, Artificial Sequence
  oligonucleotide - internucleotide bonds are phosphorothioate bonds (PS)
  modified_base (1)..(3): LNA nucleoside
  modified_base (13)..(14): LNA nucleoside
  modified_base (10)..(10): 5-methyl cytosine
  modified_base (12)..(12): 5-methyl cytosine
ccagctggacgcgg

SEQ ID NO: 2319 - DNA, 14 bp, Artificial Sequence
  oligonucleotide - internucleotide bonds are phosphorothioate bonds (PS)
  modified_base (1)..(2): LNA nucleoside
  modified_base (12)..(14): LNA nucleoside
  modified_base (10)..(10): 5-methyl cytosine
ccagctggacgcgg

SEQ ID NO: 2320 - DNA, 15 bp, Artificial Sequence
  oligonucleotide - internucleotide bonds are phosphorothioate bonds (PS)
  modified_base (1)..(2): LNA nucleoside
  modified_base (14)..(15): LNA nucleoside
ccacccactcagagg

SEQ ID NO: 2321 - DNA, 15 bp, Artificial Sequence
  oligonucleotide - internucleotide bonds are phosphorothioate bonds (PS)
  modified_base (1)..(2): LNA nucleoside
  modified_base (13)..(15): LNA nucleoside
ccacccactcagagg

SEQ ID NO: 2322 - DNA, 15 bp, Artificial Sequence
  oligonucleotide - internucleotide bonds are phosphorothioate bonds (PS)
  modified_base (1)..(3): LNA nucleoside
  modified_base (14)..(15): LNA nucleoside
ccacccactcagagg

SEQ ID NO: 2323 - DNA, 14 bp, Artificial Sequence
  oligonucleotide - internucleotide bonds are phosphorothioate bonds (PS)
  modified_base (1)..(2): LNA nucleoside
  modified_base (13)..(14): LNA nucleoside
aggctgctaccagg

SEQ ID NO: 2324 - DNA, 14 bp, Artificial Sequence
  oligonucleotide - internucleotide bonds are phosphorothioate bonds (PS)
  modified_base (1)..(2): LNA nucleoside
  modified_base (12)..(14): LNA nucleoside
aggctgctaccagg

SEQ ID NO: 2325 - DNA, 14 bp, Artificial Sequence
  oligonucleotide - internucleotide bonds are phosphorothioate bonds (PS)
  modified_base (1)..(3): LNA nucleoside
  modified_base (12)..(14): LNA nucleoside
aggctgctaccagg

SEQ ID NO: 2326 - DNA, 14 bp, Artificial Sequence
  oligonucleotide - internucleotide bonds are phosphorothioate bonds (PS)
  modified_base (1)..(2): LNA nucleoside
  modified_base (13)..(14): LNA nucleoside
agtgcccacatccg

SEQ ID NO: 2327 - DNA, 14 bp, Artificial Sequence
  oligonucleotide - internucleotide bonds are phosphorothioate bonds (PS)
  modified_base (1)..(3): LNA nucleoside
  modified_base (13)..(14): LNA nucleoside
agtgcccacatccg

SEQ ID NO: 2328 - DNA, 14 bp, Artificial Sequence
  oligonucleotide - internucleotide bonds are phosphorothioate bonds (PS)
  modified_base (1)..(2): LNA nucleoside
  modified_base (12)..(14): LNA nucleoside
agtgcccacatccg

SEQ ID NO: 2329 - DNA, 14 bp, Artificial Sequence
  oligonucleotide - internucleotide bonds are phosphorothioate bonds (PS)
  modified_base (1)..(4): LNA nucleoside
  modified_base (13)..(14): LNA nucleoside
ttgtgtttggtgag

SEQ ID NO: 2330 - DNA, 14 bp, Artificial Sequence
  oligonucleotide - internucleotide bonds are phosphorothioate bonds (PS)
  modified_base (1)..(3): LNA nucleoside
  modified_base (11)..(14): LNA nucleoside
ttgtgtttggtgag

SEQ ID NO: 2331 - DNA, 14 bp, Artificial Sequence
  oligonucleotide - internucleotide bonds are phosphorothioate bonds (PS)
  modified_base (1)..(4): LNA nucleoside
  modified_base (11)..(14): LNA nucleoside
ttgtgtttggtgag

SEQ ID NO: 2332 - DNA, 15 bp, Artificial Sequence
  oligonucleotide - internucleotide bonds are phosphorothioate bonds (PS)
  modified_base (1)..(3): LNA nucleoside
  modified_base (14)..(15): LNA nucleoside
cttgtgtttggtgag

SEQ ID NO: 2333 - DNA, 15 bp, Artificial Sequence
  oligonucleotide - internucleotide bonds are phosphorothioate bonds (PS)
  modified_base (1)..(2): LNA nucleoside
  modified_base (12)..(15): LNA nucleoside
cttgtgtttggtgag

SEQ ID NO: 2334 - DNA, 15 bp, Artificial Sequence
  oligonucleotide - internucleotide bonds are phosphorothioate bonds (PS)
  modified_base (1)..(4): LNA nucleoside
  modified_base (12)..(15): LNA nucleoside
cttgtgtttggtgag

SEQ ID NO: 2335 - DNA, 20 bp, Artificial Sequence
  oligonucleotide - internucleotide bonds are phosphorothioate bonds (PS)
  modified_base (1)..(2): LNA nucleoside
  modified_base (18)..(20): LNA nucleoside
tctatttttaattttctgag

SEQ ID NO: 2336 - DNA, 20 bp, Artificial Sequence
  oligonucleotide - internucleotide bonds are phosphorothioate bonds (PS)
  modified_base (1)..(2): LNA nucleoside
  modified_base (17)..(20): LNA nucleoside
tctatttttaattttctgag

SEQ ID NO: 2337 - DNA, 20 bp, Artificial Sequence
  oligonucleotide - internucleotide bonds are phosphorothioate bonds (PS)
  modified_base (1)..(4): LNA nucleoside
  modified_base (17)..(20): LNA nucleoside
tctatttttaattttctgag

SEQ ID NO: 2338 - DNA, 15 bp, Artificial Sequence
  oligonucleotide - internucleotide bonds are phosphorothioate bonds (PS)
  modified_base (1)..(2): LNA nucleoside
  modified_base (14)..(15): LNA nucleoside
gtcagcctcactgag

SEQ ID NO: 2339 - DNA, 15 bp, Artificial Sequence
  oligonucleotide - internucleotide bonds are phosphorothioate bonds (PS)
  modified_base (1)..(2): LNA nucleoside
  modified_base (13)..(15): LNA nucleoside
gtcagcctcactgag

SEQ ID NO: 2340 - DNA, 15 bp, Artificial Sequence
  oligonucleotide - internucleotide bonds are phosphorothioate bonds (PS)
  modified_base (1)..(2): LNA nucleoside
  modified_base (12)..(15): LNA nucleoside
gtcagcctcactgag

SEQ ID NO: 2341 - DNA, 14 bp, Artificial Sequence
  oligonucleotide - internucleotide bonds are phosphorothioate bonds (PS)
  modified_base (1)..(2): LNA nucleoside
  modified_base (12)..(14): LNA nucleoside
agcaaccagaggag

SEQ ID NO: 2342 - DNA, 14 bp, Artificial Sequence
  oligonucleotide - internucleotide bonds are phosphorothioate bonds (PS)
  modified_base (1)..(2): LNA nucleoside
  modified_base (11)..(14): LNA nucleoside
agcaaccagaggag

SEQ ID NO: 2343 - DNA, 14 bp, Artificial Sequence
  oligonucleotide - internucleotide bonds are phosphorothioate bonds (PS)
  modified_base (1)..(3): LNA nucleoside
  modified_base (11)..(14): LNA nucleoside
agcaaccagaggag

SEQ ID NO: 2344 - DNA, 15 bp, Artificial Sequence
  oligonucleotide - internucleotide bonds are phosphorothioate bonds (PS)
  modified_base (1)..(2): LNA nucleoside
  modified_base (14)..(15): LNA nucleoside
agggccagacaggag

SEQ ID NO: 2345 - DNA, 15 bp, Artificial Sequence
  oligonucleotide - internucleotide bonds are phosphorothioate bonds (PS)
  modified_base (1)..(2): LNA nucleoside
  modified_base (13)..(15): LNA nucleoside
agggccagacaggag

SEQ ID NO: 2346 - DNA, 15 bp, Artificial Sequence
  oligonucleotide - internucleotide bonds are phosphorothioate bonds (PS)
  modified_base (1)..(3): LNA nucleoside
  modified_base (14)..(15): LNA nucleoside
agggccagacaggag

SEQ ID NO: 2347 - DNA, 15 bp, Artificial Sequence
  oligonucleotide - internucleotide bonds are phosphorothioate bonds (PS)
  modified_base (1)..(2): LNA nucleoside
  modified_base (14)..(15): LNA nucleoside
ctcaccctgagtcag

SEQ ID NO: 2348 - DNA, 15 bp, Artificial Sequence
  oligonucleotide - internucleotide bonds are phosphorothioate bonds (PS)
  modified_base (1)..(2): LNA nucleoside
  modified_base (13)..(15): LNA nucleoside
ctcaccctgagtcag

SEQ ID NO: 2349 - DNA, 15 bp, Artificial Sequence
  oligonucleotide - internucleotide bonds are phosphorothioate bonds (PS)
  modified_base (1)..(2): LNA nucleoside
  modified_base (12)..(15): LNA nucleoside
ctcaccctgagtcag

SEQ ID NO: 2350 - DNA, 16 bp, Artificial Sequence
  oligonucleotide - internucleotide bonds are phosphorothioate bonds (PS)
  modified_base (1)..(2): LNA nucleoside
  modified_base (15)..(16): LNA nucleoside
tctcaccctgagtcag

SEQ ID NO: 2351 - DNA, 16 bp, Artificial Sequence
  oligonucleotide - internucleotide bonds are phosphorothioate bonds (PS)
  modified_base (1)..(3): LNA nucleoside
  modified_base (15)..(16): LNA nucleoside
tctcaccctgagtcag

SEQ ID NO: 2352 - DNA, 16 bp, Artificial Sequence
  oligonucleotide - internucleotide bonds are phosphorothioate bonds (PS)
  modified_base (1)..(4): LNA nucleoside
  modified_base (15)..(16): LNA nucleoside
tctcaccctgagtcag

SEQ ID NO: 2353 - DNA, 19 bp, Artificial Sequence
  oligonucleotide - internucleotide bonds are phosphorothioate bonds (PS)
  modified_base (1)..(2): LNA nucleoside
  modified_base (18)..(19): LNA nucleoside
gatgaggaaacagactcag

SEQ ID NO: 2354 - DNA, 19 bp, Artificial Sequence
  oligonucleotide - internucleotide bonds are phosphorothioate bonds (PS)
  modified_base (1)..(4): LNA nucleoside
  modified_base (18)..(19): LNA nucleoside
gatgaggaaacagactcag

SEQ ID NO: 2355 - DNA, 19 bp, Artificial Sequence
  oligonucleotide - internucleotide bonds are phosphorothioate bonds (PS)
  modified_base (1)..(3): LNA nucleoside
  modified_base (16)..(19): LNA nucleoside
gatgaggaaacagactcag

SEQ ID NO: 2356 - DNA, 20 bp, Artificial Sequence
  oligonucleotide - internucleotide bonds are phosphorothioate bonds (PS)
  modified_base (1)..(2): LNA nucleoside
  modified_base (19)..(20): LNA nucleoside
agatgaggaaacagactcag

SEQ ID NO: 2357 - DNA, 20 bp, Artificial Sequence
  oligonucleotide - internucleotide bonds are phosphorothioate bonds (PS)
  modified_base (1)..(3): LNA nucleoside
  modified_base (19)..(20): LNA nucleoside
agatgaggaaacagactcag

SEQ ID NO: 2358 - DNA, 20 bp, Artificial Sequence
  oligonucleotide - internucleotide bonds are phosphorothioate bonds (PS)
  modified_base (1)..(3): LNA nucleoside
  modified_base (18)..(20): LNA nucleoside
agatgaggaaacagactcag

SEQ ID NO: 2359 - DNA, 16 bp, Artificial Sequence
  oligonucleotide - internucleotide bonds are phosphorothioate bonds (PS)
  modified_base (1)..(3): LNA nucleoside
  modified_base (14)..(16): LNA nucleoside
aagcaaatgtctgcag

SEQ ID NO: 2360 - DNA, 16 bp, Artificial Sequence
  oligonucleotide - internucleotide bonds are phosphorothioate bonds (PS)
  modified_base (1)..(3): LNA nucleoside
  modified_base (13)..(16): LNA nucleoside
aagcaaatgtctgcag

SEQ ID NO: 2361 - DNA, 16 bp, Artificial Sequence
  oligonucleotide - internucleotide bonds are phosphorothioate bonds (PS)
  modified_base (1)..(4): LNA nucleoside
  modified_base (13)..(16): LNA nucleoside
aagcaaatgtctgcag

SEQ ID NO: 2362 - DNA, 14 bp, Artificial Sequence
  oligonucleotide - internucleotide bonds are phosphorothioate bonds (PS)
  modified_base (1)..(3): LNA nucleoside
  modified_base (11)..(14): LNA nucleoside
ataggataatgcag

SEQ ID NO: 2363 - DNA, 14 bp, Artificial Sequence
  oligonucleotide - internucleotide bonds are phosphorothioate bonds (PS)
  modified_base (1)..(4): LNA nucleoside
  modified_base (12)..(14): LNA nucleoside
ataggataatgcag

SEQ ID NO: 2364 - DNA, 14 bp, Artificial Sequence
  oligonucleotide - internucleotide bonds are phosphorothioate bonds (PS)
  modified_base (1)..(4): LNA nucleoside
  modified_base (11)..(14): LNA nucleoside
ataggataatgcag

SEQ ID NO: 2365 - DNA, 15 bp, Artificial Sequence
  oligonucleotide - internucleotide bonds are phosphorothioate bonds (PS)
  modified_base (1)..(2): LNA nucleoside
  modified_base (14)..(15): LNA nucleoside
ggctggtgttggcag

SEQ ID NO: 2366 - DNA, 15 bp, Artificial Sequence
  oligonucleotide - internucleotide bonds are phosphorothioate bonds (PS)
  modified_base (1)..(2): LNA nucleoside
  modified_base (13)..(15): LNA nucleoside
ggctggtgttggcag

SEQ ID NO: 2367 - DNA, 15 bp, Artificial Sequence
  oligonucleotide - internucleotide bonds are phosphorothioate bonds (PS)
  modified_base (1)..(3): LNA nucleoside
  modified_base (14)..(15): LNA nucleoside
ggctggtgttggcag

SEQ ID NO: 2368 - DNA, 16 bp, Artificial Sequence
  oligonucleotide - internucleotide bonds are phosphorothioate bonds (PS)
  modified_base (1)..(2): LNA nucleoside
  modified_base (15)..(16): LNA nucleoside
tggctggtgttggcag

SEQ ID NO: 2369 - DNA, 16 bp, Artificial Sequence
  oligonucleotide - internucleotide bonds are phosphorothioate bonds (PS)
  modified_base (1)..(3): LNA nucleoside
  modified_base (15)..(16): LNA nucleoside
tggctggtgttggcag

SEQ ID NO: 2370 - DNA, 16 bp, Artificial Sequence
  oligonucleotide - internucleotide bonds are phosphorothioate bonds (PS)
  modified_base (1)..(2): LNA nucleoside
  modified_base (14)..(16): LNA nucleoside
tggctggtgttggcag

SEQ ID NO: 2371 - DNA, 17 bp, Artificial Sequence
  oligonucleotide - internucleotide bonds are phosphorothioate bonds (PS)
  modified_base (1)..(2): LNA nucleoside
  modified_base (16)..(17): LNA nucleoside
gtggctggtgttggcag

SEQ ID NO: 2372 - DNA, 17 bp, Artificial Sequence
  oligonucleotide - internucleotide bonds are phosphorothioate bonds (PS)
  modified_base (1)..(3): LNA nucleoside
  modified_base (16)..(17): LNA nucleoside
gtggctggtgttggcag

SEQ ID NO: 2373 - DNA, 17 bp, Artificial Sequence
  oligonucleotide - internucleotide bonds are phosphorothioate bonds (PS)
  modified_base (1)..(2): LNA nucleoside
  modified_base (15)..(17): LNA nucleoside
gtggctggtgttggcag

SEQ ID NO: 2374 - DNA, 15 bp, Artificial Sequence
  oligonucleotide - internucleotide bonds are phosphorothioate bonds (PS)
  modified_base (1)..(2): LNA nucleoside
  modified_base (14)..(15): LNA nucleoside
tctgctacttcccag

SEQ ID NO: 2375 - DNA, 15 bp, Artificial Sequence
  oligonucleotide - internucleotide bonds are phosphorothioate bonds (PS)
  modified_base (1)..(3): LNA nucleoside
  modified_base (14)..(15): LNA nucleoside
tctgctacttcccag

SEQ ID NO: 2376 - DNA, 15 bp, Artificial Sequence
  oligonucleotide - internucleotide bonds are phosphorothioate bonds (PS)
  modified_base (1)..(3): LNA nucleoside
  modified_base (13)..(15): LNA nucleoside
tctgctacttcccag

SEQ ID NO: 2377 - DNA, 16 bp, Artificial Sequence
  oligonucleotide - internucleotide bonds are phosphorothioate bonds (PS)
  modified_base (1)..(2): LNA nucleoside
  modified_base (15)..(16): LNA nucleoside
ctctgctacttcccag

SEQ ID NO: 2378 - DNA, 16 bp, Artificial Sequence
  oligonucleotide - internucleotide bonds are phosphorothioate bonds (PS)
  modified_base (1)..(3): LNA nucleoside
  modified_base (15)..(16): LNA nucleoside
ctctgctacttcccag

SEQ ID NO: 2379 - DNA, 16 bp, Artificial Sequence
  oligonucleotide - internucleotide bonds are phosphorothioate bonds (PS)
  modified_base (1)..(2): LNA nucleoside
  modified_base (14)..(16): LNA nucleoside
ctctgctacttcccag

SEQ ID NO: 2380 - DNA, 17 bp, Artificial Sequence
  oligonucleotide - internucleotide bonds are phosphorothioate bonds (PS)
  modified_base (1)..(2): LNA nucleoside
  modified_base (16)..(17): LNA nucleoside
cctctgctacttcccag

SEQ ID NO: 2381 - DNA, 17 bp, Artificial Sequence
  oligonucleotide - internucleotide bonds are phosphorothioate bonds (PS)
  modified_base (1)..(3): LNA nucleoside
  modified_base (16)..(17): LNA nucleoside
cctctgctacttcccag

SEQ ID NO: 2382 - DNA, 17 bp, Artificial Sequence
  oligonucleotide - internucleotide bonds are phosphorothioate bonds (PS)
  modified_base (1)..(2): LNA nucleoside
  modified_base (15)..(17): LNA nucleoside
cctctgctacttcccag

SEQ ID NO: 2383 - DNA, 15 bp, Artificial Sequence
  oligonucleotide - internucleotide bonds are phosphorothioate bonds (PS)
  modified_base (1)..(4): LNA nucleoside
  modified_base (14)..(15): LNA nucleoside
tctccaagcaagaag

SEQ ID NO: 2384 - DNA, 15 bp, Artificial Sequence
  oligonucleotide - internucleotide bonds are phosphorothioate bonds (PS)
  modified_base (1)..(3): LNA nucleoside
  modified_base (12)..(15): LNA nucleoside
tctccaagcaagaag

SEQ ID NO: 2385 - DNA, 15 bp, Artificial Sequence
  oligonucleotide - internucleotide bonds are phosphorothioate bonds (PS)
  modified_base (1)..(4): LNA nucleoside
  modified_base (12)..(15): LNA nucleoside
tctccaagcaagaag

SEQ ID NO: 2386 - DNA, 15 bp, Artificial Sequence
  oligonucleotide - internucleotide bonds are phosphorothioate bonds (PS)
  modified_base (1)..(4): LNA nucleoside
  modified_base (13)..(15): LNA nucleoside
tctccaagcaagaag

SEQ ID NO: 2387 - DNA, 14 bp, Artificial Sequence
  oligonucleotide - internucleotide bonds are phosphorothioate bonds (PS)
  modified_base (1)..(4): LNA nucleoside
  modified_base (13)..(14): LNA nucleoside
tgctttccaacaag

SEQ ID NO: 2388 - DNA, 14 bp, Artificial Sequence
  oligonucleotide - internucleotide bonds are phosphorothioate bonds (PS)
  modified_base (1)..(3): LNA nucleoside
  modified_base (11)..(14): LNA nucleoside
tgctttccaacaag

SEQ ID NO: 2389 - DNA, 14 bp, Artificial Sequence
  oligonucleotide - internucleotide bonds are phosphorothioate bonds (PS)
  modified_base (1)..(4): LNA nucleoside
  modified_base (11)..(14): LNA nucleoside
tgctttccaacaag

SEQ ID NO: 2390 - DNA, 15 bp, Artificial Sequence
  oligonucleotide - internucleotide bonds are phosphorothioate bonds (PS)
  modified_base (1)..(3): LNA nucleoside
  modified_base (13)..(15): LNA nucleoside
attctgagggctttc

SEQ ID NO: 2391 - DNA, 15 bp, Artificial Sequence
  oligonucleotide - internucleotide bonds are phosphorothioate bonds (PS)
  modified_base (1)..(4): LNA nucleoside
  modified_base (13)..(15): LNA nucleoside
attctgagggctttc

SEQ ID NO: 2392 - DNA, 15 bp, Artificial Sequence
  oligonucleotide - internucleotide bonds are phosphorothioate bonds (PS)
  modified_base (1)..(4): LNA nucleoside
  modified_base (12)..(15): LNA nucleoside
attctgagggctttc

SEQ ID NO: 2393 - DNA, 16 bp, Artificial Sequence
  oligonucleotide - internucleotide bonds are phosphorothioate bonds (PS)
  modified_base (1)..(2): LNA nucleoside
  modified_base (15)..(16): LNA nucleoside
gattctgagggctttc

SEQ ID NO: 2394 - DNA, 16 bp, Artificial Sequence
  oligonucleotide - internucleotide bonds are phosphorothioate bonds (PS)
  modified_base (1)..(3): LNA nucleoside
  modified_base (14)..(16): LNA nucleoside
gattctgagggctttc

SEQ ID NO: 2395 - DNA, 16 bp, Artificial Sequence
  oligonucleotide - internucleotide bonds are phosphorothioate bonds (PS)
  modified_base (1)..(4): LNA nucleoside
  modified_base (13)..(16): LNA nucleoside
gattctgagggctttc

SEQ ID NO: 2396 - DNA, 17 bp, Artificial Sequence
  oligonucleotide - internucleotide bonds are phosphorothioate bonds (PS)
  modified_base (1)..(2): LNA nucleoside
  modified_base (16)..(17): LNA nucleoside
ggattctgagggctttc

SEQ ID NO: 2397 - DNA, 17 bp, Artificial Sequence
  oligonucleotide - internucleotide bonds are phosphorothioate bonds (PS)
  modified_base (1)..(2): LNA nucleoside
  modified_base (15)..(17): LNA nucleoside
ggattctgagggctttc

SEQ ID NO: 2398 - DNA, 17 bp, Artificial Sequence
  oligonucleotide - internucleotide bonds are phosphorothioate bonds (PS)
  modified_base (1)..(3): LNA nucleoside
  modified_base (15)..(17): LNA nucleoside
ggattctgagggctttc

SEQ ID NO: 2399 - DNA, 15 bp, Artificial Sequence
  oligonucleotide - internucleotide bonds are phosphorothioate bonds (PS)
  modified_base (1)..(4): LNA nucleoside
  modified_base (13)..(15): LNA nucleoside
ccaaaatgcatgttc

SEQ ID NO: 2400 - DNA, 15 bp, Artificial Sequence
  oligonucleotide - internucleotide bonds are phosphorothioate bonds (PS)
  modified_base (1)..(3): LNA nucleoside
  modified_base (12)..(15): LNA nucleoside
ccaaaatgcatgttc

SEQ ID NO: 2401 - DNA, 15 bp, Artificial Sequence
  oligonucleotide - internucleotide bonds are phosphorothioate bonds (PS)
  modified_base (1)..(4): LNA nucleoside
  modified_base (12)..(15): LNA nucleoside
ccaaaatgcatgttc

SEQ ID NO: 2402 - DNA, 14 bp, Artificial Sequence
  oligonucleotide - internucleotide bonds are phosphorothioate bonds (PS)
  modified_base (1)..(2): LNA nucleoside
  modified_base (13)..(14): LNA nucleoside
caaggccagggttc

SEQ ID NO: 2403 - DNA, 14 bp, Artificial Sequence
  oligonucleotide - internucleotide bonds are phosphorothioate bonds (PS)
  modified_base (1)..(3): LNA nucleoside
  modified_base (12)..(14): LNA nucleoside
caaggccagggttc

SEQ ID NO: 2404 - DNA, 14 bp, Artificial Sequence
  oligonucleotide - internucleotide bonds are phosphorothioate bonds (PS)
  modified_base (1)..(4): LNA nucleoside
  modified_base (12)..(14): LNA nucleoside
caaggccagggttc

SEQ ID NO: 2405 - DNA, 16 bp, Artificial Sequence
  oligonucleotide - internucleotide bonds are phosphorothioate bonds (PS)
  modified_base (1)..(2): LNA nucleoside
  modified_base (15)..(16): LNA nucleoside
cagagcctcttccttc

SEQ ID NO: 2406 - DNA, 16 bp, Artificial Sequence
  oligonucleotide - internucleotide bonds are phosphorothioate bonds (PS)
  modified_base (1)..(2): LNA nucleoside
  modified_base (14)..(16): LNA nucleoside
cagagcctcttccttc

SEQ ID NO: 2407 - DNA, 16 bp, Artificial Sequence
  oligonucleotide - internucleotide bonds are phosphorothioate bonds (PS)
  modified_base (1)..(3): LNA nucleoside
  modified_base (15)..(16): LNA nucleoside
cagagcctcttccttc

SEQ ID NO: 2408 - DNA, 17 bp, Artificial Sequence
  oligonucleotide - internucleotide bonds are phosphorothioate bonds (PS)
  modified_base (1)..(2): LNA nucleoside
  modified_base (16)..(17): LNA nucleoside
gcagagcctcttccttc

SEQ ID NO: 2409 - DNA, 17 bp, Artificial Sequence
  oligonucleotide - internucleotide bonds are phosphorothioate bonds (PS)
  modified_base (1)..(2): LNA nucleoside
  modified_base (15)..(17): LNA nucleoside
gcagagcctcttccttc

SEQ ID NO: 2410 - DNA, 17 bp, Artificial Sequence
  oligonucleotide - internucleotide bonds are phosphorothioate bonds (PS)
  modified_base (1)..(3): LNA nucleoside
  modified_base (16)..(17): LNA nucleoside
gcagagcctcttccttc

SEQ ID NO: 2411 - DNA, 14 bp, Artificial Sequence
  oligonucleotide - internucleotide bonds are phosphorothioate bonds (PS)
  modified_base (1)..(3): LNA nucleoside
  modified_base (11)..(14): LNA nucleoside
ccacaggaatattc

SEQ ID NO: 2412 - DNA, 14 bp, Artificial Sequence
  oligonucleotide - internucleotide bonds are phosphorothioate bonds (PS)
  modified_base (1)..(4): LNA nucleoside
  modified_base (12)..(14): LNA nucleoside
ccacaggaatattc

SEQ ID NO: 2413 - DNA, 14 bp, Artificial Sequence
  oligonucleotide - internucleotide bonds are phosphorothioate bonds (PS)
  modified_base (1)..(4): LNA nucleoside
  modified_base (11)..(14): LNA nucleoside
ccacaggaatattc

SEQ ID NO: 2414 - DNA, 14 bp, Artificial Sequence
  oligonucleotide - internucleotide bonds are phosphorothioate bonds (PS)
  modified_base (1)..(2): LNA nucleoside
  modified_base (12)..(14): LNA nucleoside
catgctcctatgtc

SEQ ID NO: 2415 - DNA, 14 bp, Artificial Sequence
  oligonucleotide - internucleotide bonds are phosphorothioate bonds (PS)
  modified_base (1)..(2): LNA nucleoside
  modified_base (11)..(14): LNA nucleoside
catgctcctatgtc

SEQ ID NO: 2416 - DNA, 14 bp, Artificial Sequence
  oligonucleotide - internucleotide bonds are phosphorothioate bonds (PS)
  modified_base (1)..(4): LNA nucleoside
  modified_base (11)..(14): LNA nucleoside
catgctcctatgtc

SEQ ID NO: 2417 - DNA, 15 bp, Artificial Sequence
  oligonucleotide - internucleotide bonds are phosphorothioate bonds (PS)
  modified_base (1)..(2): LNA nucleoside
  modified_base (14)..(15): LNA nucleoside
ccatgctcctatgtc

SEQ ID NO: 2418 - DNA, 15 bp, Artificial Sequence
  oligonucleotide - internucleotide bonds are phosphorothioate bonds (PS)
  modified_base (1)..(3): LNA nucleoside
  modified_base (14)..(15): LNA nucleoside
ccatgctcctatgtc

SEQ ID NO: 2419 - DNA, 15 bp, Artificial Sequence
  oligonucleotide - internucleotide bonds are phosphorothioate bonds (PS)
  modified_base (1)..(4): LNA nucleoside
  modified_base (14)..(15): LNA nucleoside
ccatgctcctatgtc

SEQ ID NO: 2420 - DNA, 16 bp, Artificial Sequence
  oligonucleotide - internucleotide bonds are phosphorothioate bonds (PS)
  modified_base (1)..(2): LNA nucleoside
  modified_base (15)..(16): LNA nucleoside
gccatgctcctatgtc

SEQ ID NO: 2421 - DNA, 16 bp, Artificial Sequence
  oligonucleotide - internucleotide bonds are phosphorothioate bonds (PS)
  modified_base (1)..(2): LNA nucleoside
  modified_base (14)..(16): LNA nucleoside
gccatgctcctatgtc

SEQ ID NO: 2422 - DNA, 16 bp, Artificial Sequence
  oligonucleotide - internucleotide bonds are phosphorothioate bonds (PS)
  modified_base (1)..(3): LNA nucleoside
  modified_base (15)..(16): LNA nucleoside
gccatgctcctatgtc

SEQ ID NO: 2423 - DNA, 17 bp, Artificial Sequence
  oligonucleotide - internucleotide bonds are phosphorothioate bonds (PS)
  modified_base (1)..(2): LNA nucleoside
  modified_base (16)..(17): LNA nucleoside
tgccatgctcctatgtc

SEQ ID NO: 2424 - DNA, 17 bp, Artificial Sequence
  oligonucleotide - internucleotide bonds are phosphorothioate bonds (PS)
  modified_base (1)..(2): LNA nucleoside
  modified_base (15)..(17): LNA nucleoside
tgccatgctcctatgtc

SEQ ID NO: 2425 - DNA, 17 bp, Artificial Sequence
  oligonucleotide - internucleotide bonds are phosphorothioate bonds (PS)
  modified_base (1)..(3): LNA nucleoside
  modified_base (16)..(17): LNA nucleoside
tgccatgctcctatgtc

SEQ ID NO: 2426 - DNA, 14 bp, Artificial Sequence
  oligonucleotide - internucleotide bonds are phosphorothioate bonds (PS)
  modified_base (1)..(2): LNA nucleoside
  modified_base (13)..(14): LNA nucleoside
ctgtgttgtgggtc

SEQ ID NO: 2427 - DNA, 14 bp, Artificial Sequence
  oligonucleotide - internucleotide bonds are phosphorothioate bonds (PS)
  modified_base (1)..(3): LNA nucleoside
  modified_base (12)..(14): LNA nucleoside
ctgtgttgtgggtc

SEQ ID NO: 2428 - DNA, 14 bp, Artificial Sequence
  oligonucleotide - internucleotide bonds are phosphorothioate bonds (PS)
  modified_base (1)..(4): LNA nucleoside
  modified_base (12)..(14): LNA nucleoside
ctgtgttgtgggtc

SEQ ID NO: 2429 - DNA, 14 bp, Artificial Sequence
  oligonucleotide - internucleotide bonds are phosphorothioate bonds (PS)
  modified_base (1)..(2): LNA nucleoside
  modified_base (13)..(14): LNA nucleoside
  modified_base (11)..(11): 5-methyl cytosine
tggcctgtgccgtc

SEQ ID NO: 2430 - DNA, 14 bp, Artificial Sequence
  oligonucleotide - internucleotide bonds are phosphorothioate bonds (PS)
  modified_base (1)..(2): LNA nucleoside
  modified_base (12)..(14): LNA nucleoside
  modified_base (11)..(11): 5-methyl cytosine
tggcctgtgccgtc

SEQ ID NO: 2431 - DNA, 14 bp, Artificial Sequence
  oligonucleotide - internucleotide bonds are phosphorothioate bonds (PS)
  modified_base (1)..(3): LNA nucleoside
  modified_base (13)..(14): LNA nucleoside
  modified_base (11)..(11): 5-methyl cytosine
tggcctgtgccgtc

SEQ ID NO: 2432 - DNA, 14 bp, Artificial Sequence
  oligonucleotide - internucleotide bonds are phosphorothioate bonds (PS)
  modified_base (1)..(2): LNA nucleoside
  modified_base (13)..(14): LNA nucleoside
tctcaccctgagtc

SEQ ID NO: 2433 - DNA, 14 bp, Artificial Sequence
  oligonucleotide - internucleotide bonds are phosphorothioate bonds (PS)
  modified_base (1)..(4): LNA nucleoside
  modified_base (13)..(14): LNA nucleoside
tctcaccctgagtc

SEQ ID NO: 2434 - DNA, 14 bp, Artificial Sequence
  oligonucleotide - internucleotide bonds are phosphorothioate bonds (PS)
  modified_base (1)..(3): LNA nucleoside
  modified_base (11)..(14): LNA nucleoside
tctcaccctgagtc

SEQ ID NO: 2435 - DNA, 15 bp, Artificial Sequence
  oligonucleotide - internucleotide bonds are phosphorothioate bonds (PS)
  modified_base (1)..(2): LNA nucleoside
  modified_base (14)..(15): LNA nucleoside
caccagccatgtctc

SEQ ID NO: 2436 - DNA, 15 bp, Artificial Sequence
  oligonucleotide - internucleotide bonds are phosphorothioate bonds (PS)
  modified_base (1)..(2): LNA nucleoside
  modified_base (13)..(15): LNA nucleoside
caccagccatgtctc

SEQ ID NO: 2437 - DNA, 15 bp, Artificial Sequence
  oligonucleotide - internucleotide bonds are phosphorothioate bonds (PS)
  modified_base (1)..(2): LNA nucleoside
  modified_base (12)..(15): LNA nucleoside
caccagccatgtctc

SEQ ID NO: 2438 - DNA, 18 bp, Artificial Sequence
  oligonucleotide - internucleotide bonds are phosphorothioate bonds (PS)
  modified_base (1)..(2): LNA nucleoside
  modified_base (17)..(18): LNA nucleoside
ctttcttccttttctctc

SEQ ID NO: 2439 - DNA, 18 bp, Artificial Sequence
  oligonucleotide - internucleotide bonds are phosphorothioate bonds (PS)
  modified_base (1)..(3): LNA nucleoside
  modified_base (17)..(18): LNA nucleoside
ctttcttccttttctctc

SEQ ID NO: 2440 - DNA, 18 bp, Artificial Sequence
  oligonucleotide - internucleotide bonds are phosphorothioate bonds (PS)
  modified_base (1)..(4): LNA nucleoside
  modified_base (17)..(18): LNA nucleoside
ctttcttccttttctctc

SEQ ID NO: 2441 - DNA, 14 bp, Artificial Sequence
  oligonucleotide - internucleotide bonds are phosphorothioate bonds (PS)
  modified_base (1)..(2): LNA nucleoside
  modified_base (13)..(14): LNA nucleoside
  modified_base (3)..(3): 5-methyl cytosine
tccggttcttgctc

SEQ ID NO: 2442 - DNA, 14 bp, Artificial Sequence
  oligonucleotide - internucleotide bonds are phosphorothioate bonds (PS)
  modified_base (1)..(3): LNA nucleoside
  modified_base (13)..(14): LNA nucleoside
tccggttcttgctc

SEQ ID NO: 2443 - DNA, 14 bp, Artificial Sequence
  oligonucleotide - internucleotide bonds are phosphorothioate bonds (PS)
  modified_base (1)..(4): LNA nucleoside
  modified_base (13)..(14): LNA nucleoside
tccggttcttgctc

SEQ ID NO: 2444 - DNA, 15 bp, Artificial Sequence
  oligonucleotide - internucleotide bonds are phosphorothioate bonds (PS)
  modified_base (1)..(4): LNA nucleoside
  modified_base (14)..(15): LNA nucleoside
tccaattttatcctc

SEQ ID NO: 2445 - DNA, 15 bp, Artificial Sequence
  oligonucleotide - internucleotide bonds are phosphorothioate bonds (PS)
  modified_base (1)..(4): LNA nucleoside
  modified_base (13)..(15): LNA nucleoside
tccaattttatcctc

SEQ ID NO: 2446 - DNA, 15 bp, Artificial Sequence
  oligonucleotide - internucleotide bonds are phosphorothioate bonds (PS)
  modified_base (1)..(4): LNA nucleoside
  modified_base (12)..(15): LNA nucleoside
tccaattttatcctc

SEQ ID NO: 2447 - DNA, 16 bp, Artificial Sequence
  oligonucleotide - internucleotide bonds are phosphorothioate bonds (PS)
  modified_base (1)..(3): LNA nucleoside
  modified_base (14)..(16): LNA nucleoside
atccaattttatcctc

SEQ ID NO: 2448 - DNA, 16 bp, Artificial Sequence
  oligonucleotide - internucleotide bonds are phosphorothioate bonds (PS)
  modified_base (1)..(3): LNA nucleoside
  modified_base (13)..(16): LNA nucleoside
atccaattttatcctc

SEQ ID NO: 2449 - DNA, 16 bp, Artificial Sequence
  oligonucleotide - internucleotide bonds are phosphorothioate bonds (PS)
  modified_base (1)..(4): LNA nucleoside
  modified_base (13)..(16): LNA nucleoside
atccaattttatcctc

SEQ ID NO: 2450 - DNA, 14 bp, Artificial Sequence
  oligonucleotide - internucleotide bonds are phosphorothioate bonds (PS)
  modified_base (1)..(2): LNA nucleoside
  modified_base (13)..(14): LNA nucleoside
cctgagagtgcctc

SEQ ID NO: 2451 - DNA, 14 bp, Artificial Sequence
  oligonucleotide - internucleotide bonds are phosphorothioate bonds (PS)
  modified_base (1)..(2): LNA nucleoside
  modified_base (12)..(14): LNA nucleoside
cctgagagtgcctc

SEQ ID NO: 2452 - DNA, 14 bp, Artificial Sequence
  oligonucleotide - internucleotide bonds are phosphorothioate bonds (PS)
  modified_base (1)..(3): LNA nucleoside
  modified_base (12)..(14): LNA nucleoside
cctgagagtgcctc

SEQ ID NO: 2453 - DNA, 14 bp, Artificial Sequence
  oligonucleotide - internucleotide bonds are phosphorothioate bonds (PS)
  modified_base (1)..(2): LNA nucleoside
  modified_base (13)..(14): LNA nucleoside
ggcctctacccctc

SEQ ID NO: 2454 - DNA, 14 bp, Artificial Sequence
  oligonucleotide - internucleotide bonds are phosphorothioate bonds (PS)
  modified_base (1)..(2): LNA nucleoside
  modified_base (12)..(14): LNA nucleoside
ggcctctacccctc

SEQ ID NO: 2455 - DNA, 14 bp, Artificial Sequence
  oligonucleotide - internucleotide bonds are phosphorothioate bonds (PS)
  modified_base (1)..(3): LNA nucleoside
  modified_base (13)..(14): LNA nucleoside
ggcctctacccctc

SEQ ID NO: 2456 - DNA, 17 bp, Artificial Sequence
  oligonucleotide - internucleotide bonds are phosphorothioate bonds (PS)
  modified_base (1)..(2): LNA nucleoside
  modified_base (14)..(17): LNA nucleoside
gatgaggaaacagactc

SEQ ID NO: 2457 - DNA, 17 bp, Artificial Sequence
  oligonucleotide - internucleotide bonds are phosphorothioate bonds (PS)
  modified_base (1)..(3): LNA nucleoside
  modified_base (14)..(17): LNA nucleoside
gatgaggaaacagactc

SEQ ID NO: 2458 - DNA, 17 bp, Artificial Sequence
  oligonucleotide - internucleotide bonds are phosphorothioate bonds (PS)
  modified_base (1)..(4): LNA nucleoside
  modified_base (14)..(17): LNA nucleoside
gatgaggaaacagactc

SEQ ID NO: 2459 - DNA, 18 bp, Artificial Sequence
  oligonucleotide - internucleotide bonds are phosphorothioate bonds (PS)
  modified_base (1)..(2): LNA nucleoside
  modified_base (16)..(18): LNA nucleoside
agatgaggaaacagactc

SEQ ID NO: 2460 - DNA, 18 bp, Artificial Sequence
  oligonucleotide - internucleotide bonds are phosphorothioate bonds (PS)
  modified_base (1)..(4): LNA nucleoside
  modified_base (17)..(18): LNA nucleoside
agatgaggaaacagactc

SEQ ID NO: 2461 - DNA, 18 bp, Artificial Sequence
  oligonucleotide - internucleotide bonds are phosphorothioate bonds (PS)
  modified_base (1)..(4): LNA nucleoside
  modified_base (15)..(18): LNA nucleoside
agatgaggaaacagactc

SEQ ID NO: 2462 - DNA, 14 bp, Artificial Sequence
  oligonucleotide - internucleotide bonds are phosphorothioate bonds (PS)
  modified_base (1)..(2): LNA nucleoside
  modified_base (12)..(14): LNA nucleoside
gcctcagatctatc

SEQ ID NO: 2463 - DNA, 14 bp, Artificial Sequence
  oligonucleotide - internucleotide bonds are phosphorothioate bonds (PS)
  modified_base (1)..(3): LNA nucleoside
  modified_base (12)..(14): LNA nucleoside
gcctcagatctatc

SEQ ID NO: 2464 - DNA, 14 bp, Artificial Sequence
  oligonucleotide - internucleotide bonds are phosphorothioate bonds (PS)
  modified_base (1)..(3): LNA nucleoside
  modified_base (11)..(14): LNA nucleoside
gcctcagatctatc

SEQ ID NO: 2465 - DNA, 14 bp, Artificial Sequence
  oligonucleotide - internucleotide bonds are phosphorothioate bonds (PS)
  modified_base (1)..(4): LNA nucleoside
  modified_base (12)..(14): LNA nucleoside
actcactgatgatc

SEQ ID NO: 2466 - DNA, 14 bp, Artificial Sequence
  oligonucleotide - internucleotide bonds are phosphorothioate bonds (PS)
  modified_base (1)..(3): LNA nucleoside
  modified_base (11)..(14): LNA nucleoside
actcactgatgatc

SEQ ID NO: 2467 - DNA, 14 bp, Artificial Sequence
  oligonucleotide - internucleotide bonds are phosphorothioate bonds (PS)
  modified_base (1)..(4): LNA nucleoside
  modified_base (11)..(14): LNA nucleoside
actcactgatgatc

SEQ ID NO: 2468 - DNA, 14 bp, Artificial Sequence
  oligonucleotide - internucleotide bonds are phosphorothioate bonds (PS)
  modified_base (1)..(4): LNA nucleoside
  modified_base (12)..(14): LNA nucleoside
tactcatactcatc

SEQ ID NO: 2469 - DNA, 14 bp, Artificial Sequence
  oligonucleotide - internucleotide bonds are phosphorothioate bonds (PS)
  modified_base (1)..(3): LNA nucleoside
  modified_base (11)..(14): LNA nucleoside
tactcatactcatc

SEQ ID NO: 2470 - DNA, 14 bp, Artificial Sequence
  oligonucleotide - internucleotide bonds are phosphorothioate bonds (PS)
  modified_base (1)..(4): LNA nucleoside
  modified_base (11)..(14): LNA nucleoside
tactcatactcatc

SEQ ID NO: 2471 - DNA, 15 bp, Artificial Sequence
  oligonucleotide - internucleotide bonds are phosphorothioate bonds (PS)
  modified_base (1)..(4): LNA nucleoside
  modified_base (13)..(15): LNA nucleoside
ttactcatactcatc

SEQ ID NO: 2472 - DNA, 15 bp, Artificial Sequence
  oligonucleotide - internucleotide bonds are phosphorothioate bonds (PS)
  modified_base (1)..(3): LNA nucleoside
  modified_base (12)..(15): LNA nucleoside
ttactcatactcatc

SEQ ID NO: 2473 - DNA, 15 bp, Artificial Sequence
  oligonucleotide - internucleotide bonds are phosphorothioate bonds (PS)
  modified_base (1)..(4): LNA nucleoside
  modified_base (12)..(15): LNA nucleoside
ttactcatactcatc

SEQ ID NO: 2474 - DNA, 14 bp, Artificial Sequence
  oligonucleotide - internucleotide bonds are phosphorothioate bonds (PS)
  modified_base (1)..(2): LNA nucleoside
  modified_base (13)..(14): LNA nucleoside
ttccccaggccatc

SEQ ID NO: 2475 - DNA, 14 bp, Artificial Sequence
  oligonucleotide - internucleotide bonds are phosphorothioate bonds (PS)
  modified_base (1)..(3): LNA nucleoside
  modified_base (13)..(14): LNA nucleoside
ttccccaggccatc

SEQ ID NO: 2476 - DNA, 14 bp, Artificial Sequence
  oligonucleotide - internucleotide bonds are phosphorothioate bonds (PS)
  modified_base (1)..(3): LNA nucleoside
  modified_base (12)..(14): LNA nucleoside
ttccccaggccatc

SEQ ID NO: 2477 - DNA, 16 bp, Artificial Sequence
  oligonucleotide - internucleotide bonds are phosphorothioate bonds (PS)
  modified_base (1)..(2): LNA nucleoside
  modified_base (15)..(16): LNA nucleoside
ccctgctgggccctgc

SEQ ID NO: 2478 - DNA, 16 bp, Artificial Sequence
  oligonucleotide - internucleotide bonds are phosphorothioate bonds (PS)
  modified_base (1)..(2): LNA nucleoside
  modified_base (14)..(16): LNA nucleoside
ccctgctgggccctgc

SEQ ID NO: 2479 - DNA, 16 bp, Artificial Sequence
  oligonucleotide - internucleotide bonds are phosphorothioate bonds (PS)
  modified_base (1)..(3): LNA nucleoside
  modified_base (15)..(16): LNA nucleoside
ccctgctgggccctgc

SEQ ID NO: 2480 - DNA, 14 bp, Artificial Sequence
  oligonucleotide - internucleotide bonds are phosphorothioate bonds (PS)
  modified_base (1)..(4): LNA nucleoside
  modified_base (12)..(14): LNA nucleoside
caggaaaagactgc

SEQ ID NO: 2481 - DNA, 14 bp, Artificial Sequence
  oligonucleotide - internucleotide bonds are phosphorothioate bonds (PS)
  modified_base (1)..(3): LNA nucleoside
  modified_base (11)..(14): LNA nucleoside
caggaaaagactgc

SEQ ID NO: 2482 - DNA, 14 bp, Artificial Sequence
  oligonucleotide - internucleotide bonds are phosphorothioate bonds (PS)
  modified_base (1)..(4): LNA nucleoside
  modified_base (11)..(14): LNA nucleoside
caggaaaagactgc

SEQ ID NO: 2483 - DNA, 16 bp, Artificial Sequence
  oligonucleotide - internucleotide bonds are phosphorothioate bonds (PS)
  modified_base (1)..(3): LNA nucleoside
  modified_base (13)..(16): LNA nucleoside
attattttgtttatgc

SEQ ID NO: 2484 - DNA, 16 bp, Artificial Sequence
  oligonucleotide - internucleotide bonds are phosphorothioate bonds (PS)
  modified_base (1)..(4): LNA nucleoside
  modified_base (14)..(16): LNA nucleoside
attattttgtttatgc

SEQ ID NO: 2485 - DNA, 16 bp, Artificial Sequence
  oligonucleotide - internucleotide bonds are phosphorothioate bonds (PS)
  modified_base (1)..(4): LNA nucleoside
  modified_base (13)..(16): LNA nucleoside
attattttgtttatgc

SEQ ID NO: 2486 - DNA, 17 bp, Artificial Sequence
  oligonucleotide - internucleotide bonds are phosphorothioate bonds (PS)
  modified_base (1)..(4): LNA nucleoside
  modified_base (16)..(17): LNA nucleoside
cattattttgtttatgc

SEQ ID NO: 2487 - DNA, 17 bp, Artificial Sequence
  oligonucleotide - internucleotide bonds are phosphorothioate bonds (PS)
  modified_base (1)..(3): LNA nucleoside
  modified_base (14)..(17): LNA nucleoside
cattattttgtttatgc

SEQ ID NO: 2488 - DNA, 17 bp, Artificial Sequence
  oligonucleotide - internucleotide bonds are phosphorothioate bonds (PS)
  modified_base (1)..(4): LNA nucleoside
  modified_base (14)..(17): LNA nucleoside
cattattttgtttatgc

SEQ ID NO: 2489 - DNA, 18 bp, Artificial Sequence
  oligonucleotide - internucleotide bonds are phosphorothioate bonds (PS)
  modified_base (1)..(3): LNA nucleoside
  modified_base (17)..(18): LNA nucleoside
acattattttgtttatgc

SEQ ID NO: 2490 - DNA, 18 bp, Artificial Sequence
  oligonucleotide - internucleotide bonds are phosphorothioate bonds (PS)
  modified_base (1)..(3): LNA nucleoside
  modified_base (16)..(18): LNA nucleoside
acattattttgtttatgc

SEQ ID NO: 2491 - DNA, 18 bp, Artificial Sequence
  oligonucleotide - internucleotide bonds are phosphorothioate bonds (PS)
  modified_base (1)..(4): LNA nucleoside
  modified_base (15)..(18): LNA nucleoside
acattattttgtttatgc

SEQ ID NO: 2492 - DNA, 19 bp, Artificial Sequence
  oligonucleotide - internucleotide bonds are phosphorothioate bonds (PS)
  modified_base (1)..(3): LNA nucleoside
  modified_base (18)..(19): LNA nucleoside
tacattattttgtttatgc

SEQ ID NO: 2493 - DNA, 19 bp, Artificial Sequence
  oligonucleotide - internucleotide bonds are phosphorothioate bonds (PS)
  modified_base (1)..(3): LNA nucleoside
  modified_base (17)..(19): LNA nucleoside
tacattattttgtttatgc

SEQ ID NO: 2494 - DNA, 19 bp, Artificial Sequence
  oligonucleotide - internucleotide bonds are phosphorothioate bonds (PS)
  modified_base (1)..(4): LNA nucleoside
  modified_base (16)..(19): LNA nucleoside
tacattattttgtttatgc

SEQ ID NO: 2495 - DNA, 14 bp, Artificial Sequence
  oligonucleotide - internucleotide bonds are phosphorothioate bonds (PS)
  modified_base (1)..(2): LNA nucleoside
  modified_base (13)..(14): LNA nucleoside
cctgcactagatgc

SEQ ID NO: 2496 - DNA, 14 bp, Artificial Sequence
  oligonucleotide - internucleotide bonds are phosphorothioate bonds (PS)
  modified_base (1)..(2): LNA nucleoside
  modified_base (12)..(14): LNA nucleoside
cctgcactagatgc

SEQ ID NO: 2497 - DNA, 14 bp, Artificial Sequence
  oligonucleotide - internucleotide bonds are phosphorothioate bonds (PS)
  modified_base (1)..(3): LNA nucleoside
  modified_base (12)..(14): LNA nucleoside
cctgcactagatgc

SEQ ID NO: 2498 - DNA, 15 bp, Artificial Sequence
  oligonucleotide - internucleotide bonds are phosphorothioate bonds (PS)
  modified_base (1)..(2): LNA nucleoside
  modified_base (14)..(15): LNA nucleoside
gtggctggtgttggc

SEQ ID NO: 2499 - DNA, 15 bp, Artificial Sequence
  oligonucleotide - internucleotide bonds are phosphorothioate bonds (PS)
  modified_base (1)..(2): LNA nucleoside
  modified_base (13)..(15): LNA nucleoside
gtggctggtgttggc

SEQ ID NO: 2500 - DNA, 15 bp, Artificial Sequence
  oligonucleotide - internucleotide bonds are phosphorothioate bonds (PS)
  modified_base (1)..(3): LNA nucleoside
  modified_base (14)..(15): LNA nucleoside
gtggctggtgttggc

SEQ ID NO: 2501 - DNA, 15 bp, Artificial Sequence
  oligonucleotide - internucleotide bonds are phosphorothioate bonds (PS)
  modified_base (1)..(2): LNA nucleoside
  modified_base (14)..(15): LNA nucleoside
ctttgccctcctggc

SEQ ID NO: 2502 - DNA, 15 bp, Artificial Sequence
  oligonucleotide - internucleotide bonds are phosphorothioate bonds (PS)
  modified_base (1)..(3): LNA nucleoside
  modified_base (14)..(15): LNA nucleoside
ctttgccctcctggc

SEQ ID NO: 2503 - DNA, 15 bp, Artificial Sequence
  oligonucleotide - internucleotide bonds are phosphorothioate bonds (PS)
  modified_base (1)..(2): LNA nucleoside
  modified_base (13)..(15): LNA nucleoside
ctttgccctcctggc

SEQ ID NO: 2504 - DNA, 14 bp, Artificial Sequence
  oligonucleotide - internucleotide bonds are phosphorothioate bonds (PS)
  modified_base (1)..(2): LNA nucleoside
  modified_base (13)..(14): LNA nucleoside
atcacacccatggc

SEQ ID NO: 2505 - DNA, 14 bp, Artificial Sequence
  oligonucleotide - internucleotide bonds are phosphorothioate bonds (PS)
  modified_base (1)..(3): LNA nucleoside
  modified_base (12)..(14): LNA nucleoside
atcacacccatggc

SEQ ID NO: 2506 - DNA, 14 bp, Artificial Sequence
  oligonucleotide - internucleotide bonds are phosphorothioate bonds (PS)
  modified_base (1)..(4): LNA nucleoside
  modified_base (12)..(14): LNA nucleoside
atcacacccatggc

SEQ ID NO: 2507 - DNA, 15 bp, Artificial Sequence
  oligonucleotide - internucleotide bonds are phosphorothioate bonds (PS)
  modified_base (1)..(2): LNA nucleoside
  modified_base (14)..(15): LNA nucleoside
catcacacccatggc

SEQ ID NO: 2508 - DNA, 15 bp, Artificial Sequence
  oligonucleotide - internucleotide bonds are phosphorothioate bonds (PS)
  modified_base (1)..(3): LNA nucleoside
  modified_base (14)..(15): LNA nucleoside
catcacacccatggc

SEQ ID NO: 2509 - DNA, 15 bp, Artificial Sequence
  oligonucleotide - internucleotide bonds are phosphorothioate bonds (PS)
  modified_base (1)..(2): LNA nucleoside
  modified_base (13)..(15): LNA nucleoside
catcacacccatggc

SEQ ID NO: 2510 - DNA, 16 bp, Artificial Sequence
  oligonucleotide - internucleotide bonds are phosphorothioate bonds (PS)
  modified_base (1)..(2): LNA nucleoside
  modified_base (15)..(16): LNA nucleoside
tcatcacacccatggc

SEQ ID NO: 2511 - DNA, 16 bp, Artificial Sequence
  oligonucleotide - internucleotide bonds are phosphorothioate bonds (PS)
  modified_base (1)..(2): LNA nucleoside
  modified_base (14)..(16): LNA nucleoside
tcatcacacccatggc

SEQ ID NO: 2512 - DNA, 16 bp, Artificial Sequence
  oligonucleotide - internucleotide bonds are phosphorothioate bonds (PS)
  modified_base (1)..(3): LNA nucleoside
  modified_base (15)..(16): LNA nucleoside
tcatcacacccatggc

SEQ ID NO: 2513 - DNA, 14 bp, Artificial Sequence
  oligonucleotide - internucleotide bonds are phosphorothioate bonds (PS)
  modified_base (1)..(3): LNA nucleoside
  modified_base (12)..(14): LNA nucleoside
atggttgaaatggc

SEQ ID NO: 2514 - DNA, 14 bp, Artificial Sequence
  oligonucleotide - internucleotide bonds are phosphorothioate bonds (PS)
  modified_base (1)..(4): LNA nucleoside
  modified_base (12)..(14): LNA nucleoside
atggttgaaatggc

SEQ ID NO: 2515 - DNA, 14 bp, Artificial Sequence
  oligonucleotide - internucleotide bonds are phosphorothioate bonds (PS)
  modified_base (1)..(4): LNA nucleoside
  modified_base (11)..(14): LNA nucleoside
atggttgaaatggc

SEQ ID NO: 2516 - DNA, 14 bp, Artificial Sequence
  oligonucleotide - internucleotide bonds are phosphorothioate bonds (PS)
  modified_base (1)..(3): LNA nucleoside
  modified_base (12)..(14): LNA nucleoside
tggattaagggagc

SEQ ID NO: 2517 - DNA, 14 bp, Artificial Sequence
  oligonucleotide - internucleotide bonds are phosphorothioate bonds (PS)
  modified_base (1)..(4): LNA nucleoside
  modified_base (12)..(14): LNA nucleoside
tggattaagggagc

SEQ ID NO: 2518 - DNA, 14 bp, Artificial Sequence
  oligonucleotide - internucleotide bonds are phosphorothioate bonds (PS)
  modified_base (1)..(4): LNA nucleoside
  modified_base (11)..(14): LNA nucleoside
tggattaagggagc

SEQ ID NO: 2519 - DNA, 15 bp, Artificial Sequence
  oligonucleotide - internucleotide bonds are phosphorothioate bonds (PS)
  modified_base (1)..(2): LNA nucleoside
  modified_base (14)..(15): LNA nucleoside
ctggattaagggagc

SEQ ID NO: 2520 - DNA, 15 bp, Artificial Sequence
  oligonucleotide - internucleotide bonds are phosphorothioate bonds (PS)
  modified_base (1)..(4): LNA nucleoside
  modified_base (14)..(15): LNA nucleoside
ctggattaagggagc

SEQ ID NO: 2521 - DNA, 15 bp, Artificial Sequence
  oligonucleotide - internucleotide bonds are phosphorothioate bonds (PS)
  modified_base (1)..(3): LNA nucleoside
  modified_base (12)..(15): LNA nucleoside
ctggattaagggagc

SEQ ID NO: 2522 - DNA, 15 bp, Artificial Sequence
  oligonucleotide - internucleotide bonds are phosphorothioate bonds (PS)
  modified_base (1)..(2): LNA nucleoside
  modified_base (14)..(15): LNA nucleoside
ttgcctgtgaggagc

SEQ ID NO: 2523 - DNA, 15 bp, Artificial Sequence
  oligonucleotide - internucleotide bonds are phosphorothioate bonds (PS)
  modified_base (1)..(2): LNA nucleoside
  modified_base (13)..(15): LNA nucleoside
ttgcctgtgaggagc

SEQ ID NO: 2524 - DNA, 15 bp, Artificial Sequence
  oligonucleotide - internucleotide bonds are phosphorothioate bonds (PS)
  modified_base (1)..(3): LNA nucleoside
  modified_base (13)..(15): LNA nucleoside
ttgcctgtgaggagc

SEQ ID NO: 2525 - DNA, 15 bp, Artificial Sequence
  oligonucleotide - internucleotide bonds are phosphorothioate bonds (PS)
  modified_base (1)..(2): LNA nucleoside
  modified_base (14)..(15): LNA nucleoside
gggtagagaaggagc

SEQ ID NO: 2526 - DNA, 15 bp, Artificial Sequence
  oligonucleotide - internucleotide bonds are phosphorothioate bonds (PS)
  modified_base (1)..(2): LNA nucleoside
  modified_base (13)..(15): LNA nucleoside
gggtagagaaggagc

SEQ ID NO: 2527 - DNA, 15 bp, Artificial Sequence
  oligonucleotide - internucleotide bonds are phosphorothioate bonds (PS)
  modified_base (1)..(2): LNA nucleoside
  modified_base (12)..(15): LNA nucleoside
gggtagagaaggagc

SEQ ID NO: 2528 - DNA, 15 bp, Artificial Sequence
  oligonucleotide - internucleotide bonds are phosphorothioate bonds (PS)
  modified_base (1)..(2): LNA nucleoside
  modified_base (13)..(15): LNA nucleoside
ggagaggagaagagc

SEQ ID NO: 2529 - DNA, 15 bp, Artificial Sequence
  oligonucleotide - internucleotide bonds are phosphorothioate bonds (PS)
  modified_base (1)..(2): LNA nucleoside
  modified_base (12)..(15): LNA nucleoside
ggagaggagaagagc

SEQ ID NO: 2530 - DNA, 15 bp, Artificial Sequence
  oligonucleotide - internucleotide bonds are phosphorothioate bonds (PS)
  modified_base (1)..(3): LNA nucleoside
  modified_base (12)..(15): LNA nucleoside
ggagaggagaagagc

SEQ ID NO: 2531 - DNA, 14 bp, Artificial Sequence
  oligonucleotide - internucleotide bonds are phosphorothioate bonds (PS)
  modified_base (1)..(3): LNA nucleoside
  modified_base (12)..(14): LNA nucleoside
taggataatgcagc

SEQ ID NO: 2532 - DNA, 14 bp, Artificial Sequence
  oligonucleotide - internucleotide bonds are phosphorothioate bonds (PS)
  modified_base (1)..(4): LNA nucleoside
  modified_base (12)..(14): LNA nucleoside
taggataatgcagc

SEQ ID NO: 2533 - DNA, 14 bp, Artificial Sequence
  oligonucleotide - internucleotide bonds are phosphorothioate bonds (PS)
  modified_base (1)..(4): LNA nucleoside
  modified_base (11)..(14): LNA nucleoside
taggataatgcagc

SEQ ID NO: 2534 - DNA, 15 bp, Artificial Sequence
  oligonucleotide - internucleotide bonds are phosphorothioate bonds (PS)
  modified_base (1)..(3): LNA nucleoside
  modified_base (13)..(15): LNA nucleoside
ataggataatgcagc

SEQ ID NO: 2535 - DNA, 15 bp, Artificial Sequence
  oligonucleotide - internucleotide bonds are phosphorothioate bonds (PS)
  modified_base (1)..(4): LNA nucleoside
  modified_base (13)..(15): LNA nucleoside
ataggataatgcagc

SEQ ID NO: 2536 - DNA, 15 bp, Artificial Sequence
  oligonucleotide - internucleotide bonds are phosphorothioate bonds (PS)
  modified_base (1)..(4): LNA nucleoside
  modified_base (12)..(15): LNA nucleoside
ataggataatgcagc

SEQ ID NO: 2537 - DNA, 15 bp, Artificial Sequence
  oligonucleotide - internucleotide bonds are phosphorothioate bonds (PS)
  modified_base (1)..(2): LNA nucleoside
  modified_base (14)..(15): LNA nucleoside
ctgctacttcccagc

SEQ ID NO: 2538 - DNA, 15 bp, Artificial Sequence
  oligonucleotide - internucleotide bonds are phosphorothioate bonds (PS)
  modified_base (1)..(2): LNA nucleoside
  modified_base (13)..(15): LNA nucleoside
ctgctacttcccagc

SEQ ID NO: 2539 - DNA, 15 bp, Artificial Sequence
  oligonucleotide - internucleotide bonds are phosphorothioate bonds (PS)
  modified_base (1)..(3): LNA nucleoside
  modified_base (14)..(15): LNA nucleoside
ctgctacttcccagc

SEQ ID NO: 2540 - DNA, 16 bp, Artificial Sequence
  oligonucleotide - internucleotide bonds are phosphorothioate bonds (PS)
  modified_base (1)..(2): LNA nucleoside
  modified_base (15)..(16): LNA nucleoside
tctgctacttcccagc

SEQ ID NO: 2541 - DNA, 16 bp, Artificial Sequence
  oligonucleotide - internucleotide bonds are phosphorothioate bonds (PS)
  modified_base (1)..(2): LNA nucleoside
  modified_base (14)..(16): LNA nucleoside
tctgctacttcccagc

SEQ ID NO: 2542 - DNA, 16 bp, Artificial Sequence
  oligonucleotide - internucleotide bonds are phosphorothioate bonds (PS)
  modified_base (1)..(3): LNA nucleoside
  modified_base (15)..(16): LNA nucleoside
tctgctacttcccagc

SEQ ID NO: 2543 - DNA, 17 bp, Artificial Sequence
  oligonucleotide - internucleotide bonds are phosphorothioate bonds (PS)
  modified_base (1)..(2): LNA nucleoside
  modified_base (16)..(17): LNA nucleoside
ctctgctacttcccagc

SEQ ID NO: 2544 - DNA, 17 bp, Artificial Sequence
  oligonucleotide - internucleotide bonds are phosphorothioate bonds (PS)
  modified_base (1)..(2): LNA nucleoside
  modified_base (15)..(17): LNA nucleoside
ctctgctacttcccagc

SEQ ID NO: 2545 - DNA, 17 bp, Artificial Sequence
  oligonucleotide - internucleotide bonds are phosphorothioate bonds (PS)
  modified_base (1)..(3): LNA nucleoside
  modified_base (16)..(17): LNA nucleoside
ctctgctacttcccagc

SEQ ID NO: 2546 - DNA, 18 bp, Artificial Sequence
  oligonucleotide - internucleotide bonds are phosphorothioate bonds (PS)
  modified_base (1)..(2): LNA nucleoside
  modified_base (17)..(18): LNA nucleoside
cctctgctacttcccagc

SEQ ID NO: 2547 - DNA, 18 bp, Artificial Sequence
  oligonucleotide - internucleotide bonds are phosphorothioate bonds (PS)
  modified_base (1)..(2): LNA nucleoside
  modified_base (16)..(18): LNA nucleoside
cctctgctacttcccagc

SEQ ID NO: 2548 - DNA, 18 bp, Artificial Sequence
  oligonucleotide - internucleotide bonds are phosphorothioate bonds (PS)
  modified_base (1)..(3): LNA nucleoside
  modified_base (17)..(18): LNA nucleoside
cctctgctacttcccagc

SEQ ID NO: 2549 - DNA, 14 bp, Artificial Sequence
  oligonucleotide - internucleotide bonds are phosphorothioate bonds (PS)
  modified_base (1)..(2): LNA nucleoside
  modified_base (13)..(14): LNA nucleoside
  modified_base (6)..(6): 5-methyl cytosine
tcccacgccaaagc

SEQ ID NO: 2550 - DNA, 14 bp, Artificial Sequence
  oligonucleotide - internucleotide bonds are phosphorothioate bonds (PS)
  modified_base (1)..(2): LNA nucleoside
  modified_base (12)..(14): LNA nucleoside
  modified_base (6)..(6): 5-methyl cytosine
tcccacgccaaagc

SEQ ID NO: 2551 - DNA, 14 bp, Artificial Sequence
  oligonucleotide - internucleotide bonds are phosphorothioate bonds (PS)
  modified_base (1)..(3): LNA nucleoside
  modified_base (13)..(14): LNA nucleoside
  modified_base (6)..(6): 5-methyl cytosine
tcccacgccaaagc

SEQ ID NO: 2552 - DNA, 14 bp, Artificial Sequence
  oligonucleotide - internucleotide bonds are phosphorothioate bonds (PS)
  modified_base (1)..(2): LNA nucleoside
  modified_base (13)..(14): LNA nucleoside
ttgaccccaggtcc

SEQ ID NO: 2553 - DNA, 14 bp, Artificial Sequence
  oligonucleotide - internucleotide bonds are phosphorothioate bonds (PS)
  modified_base (1)..(3): LNA nucleoside
  modified_base (13)..(14): LNA nucleoside
ttgaccccaggtcc

SEQ ID NO: 2554 - DNA, 14 bp, Artificial Sequence
  oligonucleotide - internucleotide bonds are phosphorothioate bonds (PS)
  modified_base (1)..(2): LNA nucleoside
  modified_base (12)..(14): LNA nucleoside
ttgaccccaggtcc

SEQ ID NO: 2555 - DNA, 14 bp, Artificial Sequence
  oligonucleotide - internucleotide bonds are phosphorothioate bonds (PS)
  modified_base (1)..(2): LNA nucleoside
  modified_base (13)..(14): LNA nucleoside
cactaccattctcc

SEQ ID NO: 2556 - DNA, 14 bp, Artificial Sequence
  oligonucleotide - internucleotide bonds are phosphorothioate bonds (PS)
  modified_base (1)..(3): LNA nucleoside
  modified_base (12)..(14): LNA nucleoside
cactaccattctcc

SEQ ID NO: 2557 - DNA, 14 bp, Artificial Sequence
  oligonucleotide - internucleotide bonds are phosphorothioate bonds (PS)
  modified_base (1)..(3): LNA nucleoside
  modified_base (11)..(14): LNA nucleoside
cactaccattctcc

SEQ ID NO: 2558 - DNA, 15 bp, Artificial Sequence
  oligonucleotide - internucleotide bonds are phosphorothioate bonds (PS)
  modified_base (1)..(2): LNA nucleoside
  modified_base (12)..(15): LNA nucleoside
aaaaacatttactcc

SEQ ID NO: 2559 - DNA, 15 bp, Artificial Sequence
  oligonucleotide - internucleotide bonds are phosphorothioate bonds (PS)
  modified_base (1)..(3): LNA nucleoside
  modified_base (12)..(15): LNA nucleoside
aaaaacatttactcc

SEQ ID NO: 2560 - DNA, 15 bp, Artificial Sequence
  oligonucleotide - internucleotide bonds are phosphorothioate bonds (PS)
  modified_base (1)..(4): LNA nucleoside
  modified_base (12)..(15): LNA nucleoside
aaaaacatttactcc

SEQ ID NO: 2561 - DNA, 14 bp, Artificial Sequence
  oligonucleotide - internucleotide bonds are phosphorothioate bonds (PS)
  modified_base (1)..(3): LNA nucleoside
  modified_base (12)..(14): LNA nucleoside
gagtaagagactcc

SEQ ID NO: 2562 - DNA, 14 bp, Artificial Sequence
  oligonucleotide - internucleotide bonds are phosphorothioate bonds (PS)
  modified_base (1)..(3): LNA nucleoside
  modified_base (11)..(14): LNA nucleoside
gagtaagagactcc

SEQ ID NO: 2563 - DNA, 14 bp, Artificial Sequence
  oligonucleotide - internucleotide bonds are phosphorothioate bonds (PS)
  modified_base (1)..(4): LNA nucleoside
  modified_base (11)..(14): LNA nucleoside
gagtaagagactcc

SEQ ID NO: 2564 - DNA, 14 bp, Artificial Sequence
  oligonucleotide - internucleotide bonds are phosphorothioate bonds (PS)
  modified_base (1)..(4): LNA nucleoside
  modified_base (13)..(14): LNA nucleoside
atccaattttatcc

SEQ ID NO: 2565 - DNA, 14 bp, Artificial Sequence
  oligonucleotide - internucleotide bonds are phosphorothioate bonds (PS)
  modified_base (1)..(4): LNA nucleoside
  modified_base (12)..(14): LNA nucleoside
atccaattttatcc

SEQ ID NO: 2566 - DNA, 14 bp, Artificial Sequence
  oligonucleotide - internucleotide bonds are phosphorothioate bonds (PS)
  modified_base (1)..(4): LNA nucleoside
  modified_base (11)..(14): LNA nucleoside
atccaattttatcc

SEQ ID NO: 2567 - DNA, 15 bp, Artificial Sequence
  oligonucleotide - internucleotide bonds are phosphorothioate bonds (PS)
  modified_base (1)..(2): LNA nucleoside
  modified_base (14)..(15): LNA nucleoside
cttccccagggatcc

SEQ ID NO: 2568 - DNA, 15 bp, Artificial Sequence
  oligonucleotide - internucleotide bonds are phosphorothioate bonds (PS)
  modified_base (1)..(3): LNA nucleoside
  modified_base (14)..(15): LNA nucleoside
cttccccagggatcc

SEQ ID NO: 2569 - DNA, 15 bp, Artificial Sequence
  oligonucleotide - internucleotide bonds are phosphorothioate bonds (PS)
  modified_base (1)..(2): LNA nucleoside
  modified_base (13)..(15): LNA nucleoside
cttccccagggatcc

SEQ ID NO: 2570 - DNA, 15 bp, Artificial Sequence
  oligonucleotide - internucleotide bonds are phosphorothioate bonds (PS)
  modified_base (1)..(2): LNA nucleoside
  modified_base (13)..(15): LNA nucleoside
caggaaaagactgcc

SEQ ID NO: 2571 - DNA, 15 bp, Artificial Sequence
  oligonucleotide - internucleotide bonds are phosphorothioate bonds (PS)
  modified_base (1)..(2): LNA nucleoside
  modified_base (12)..(15): LNA nucleoside
caggaaaagactgcc

SEQ ID NO: 2572 - DNA, 15 bp, Artificial Sequence
  oligonucleotide - internucleotide bonds are phosphorothioate bonds (PS)
  modified_base (1)..(3): LNA nucleoside
  modified_base (12)..(15): LNA nucleoside
caggaaaagactgcc

SEQ ID NO: 2573 - DNA, 14 bp, Artificial Sequence
  oligonucleotide - internucleotide bonds are phosphorothioate bonds (PS)
  modified_base (1)..(2): LNA nucleoside
  modified_base (13)..(14): LNA nucleoside
cccattttcatgcc

SEQ ID NO: 2574 - DNA, 14 bp, Artificial Sequence
  oligonucleotide - internucleotide bonds are phosphorothioate bonds (PS)
  modified_base (1)..(2): LNA nucleoside
  modified_base (12)..(14): LNA nucleoside
cccattttcatgcc

SEQ ID NO: 2575 - DNA, 14 bp, Artificial Sequence
  oligonucleotide - internucleotide bonds are phosphorothioate bonds (PS)
  modified_base (1)..(3): LNA nucleoside
  modified_base (13)..(14): LNA nucleoside
cccattttcatgcc

SEQ ID NO: 2576 - DNA, 15 bp, Artificial Sequence
  oligonucleotide - internucleotide bonds are phosphorothioate bonds (PS)
  modified_base (1)..(2): LNA nucleoside
  modified_base (14)..(15): LNA nucleoside
gcccattttcatgcc

SEQ ID NO: 2577 - DNA, 15 bp, Artificial Sequence
  oligonucleotide - internucleotide bonds are phosphorothioate bonds (PS)
  modified_base (1)..(2): LNA nucleoside
  modified_base (13)..(15): LNA nucleoside
gcccattttcatgcc

SEQ ID NO: 2578 - DNA, 15 bp, Artificial Sequence
  oligonucleotide - internucleotide bonds are phosphorothioate bonds (PS)
  modified_base (1)..(3): LNA nucleoside
  modified_base (14)..(15): LNA nucleoside
gcccattttcatgcc

SEQ ID NO: 2579 - DNA, 15 bp, Artificial Sequence
  oligonucleotide - internucleotide bonds are phosphorothioate bonds (PS)
  modified_base (1)..(2): LNA nucleoside
  modified_base (14)..(15): LNA nucleoside
cctctgctacttccc

SEQ ID NO: 2580 - DNA, 15 bp, Artificial Sequence
  oligonucleotide - internucleotide bonds are phosphorothioate bonds (PS)
  modified_base (1)..(3): LNA nucleoside
  modified_base (14)..(15): LNA nucleoside
cctctgctacttccc

SEQ ID NO: 2581 - DNA, 15 bp, Artificial Sequence
  oligonucleotide - internucleotide bonds are phosphorothioate bonds (PS)
  modified_base (1)..(2): LNA nucleoside
  modified_base (13)..(15): LNA nucleoside
cctctgctacttccc

SEQ ID NO: 2582 - DNA, 14 bp, Artificial Sequence
  oligonucleotide - internucleotide bonds are phosphorothioate bonds (PS)
  modified_base (1)..(2): LNA nucleoside
  modified_base (13)..(14): LNA nucleoside
  modified_base (7)..(7): 5-methyl cytosine
tccctccgagtccc

SEQ ID NO: 2583 - DNA, 14 bp, Artificial Sequence
  oligonucleotide - internucleotide bonds are phosphorothioate bonds (PS)
  modified_base (1)..(3): LNA nucleoside
  modified_base (13)..(14): LNA nucleoside
  modified_base (7)..(7): 5-methyl cytosine
tccctccgagtccc

SEQ ID NO: 2584 - DNA, 14 bp, Artificial Sequence
  oligonucleotide - internucleotide bonds are phosphorothioate bonds (PS)
  modified_base (1)..(2): LNA nucleoside
  modified_base (12)..(14): LNA nucleoside
  modified_base (7)..(7): 5-methyl cytosine
tccctccgagtccc

SEQ ID NO: 2585 - DNA, 16 bp, Artificial Sequence
  oligonucleotide - internucleotide bonds are phosphorothioate bonds (PS)
  modified_base (1)..(2): LNA nucleoside
  modified_base (15)..(16): LNA nucleoside
gaccccagctcctccc

SEQ ID NO: 2586 - DNA, 16 bp, Artificial Sequence
  oligonucleotide - internucleotide bonds are phosphorothioate bonds (PS)
  modified_base (1)..(3): LNA nucleoside
  modified_base (15)..(16): LNA nucleoside
gaccccagctcctccc

SEQ ID NO: 2587 - DNA, 16 bp, Artificial Sequence
  oligonucleotide - internucleotide bonds are phosphorothioate bonds (PS)
  modified_base (1)..(2): LNA nucleoside
  modified_base (14)..(16): LNA nucleoside
gaccccagctcctccc

SEQ ID NO: 2588 - DNA, 14 bp, Artificial Sequence
  oligonucleotide - internucleotide bonds are phosphorothioate bonds (PS)
  modified_base (1)..(3): LNA nucleoside
  modified_base (13)..(14): LNA nucleoside
ggaaaagactgccc

SEQ ID NO: 2589 - DNA, 14 bp, Artificial Sequence
  oligonucleotide - internucleotide bonds are phosphorothioate bonds (PS)
  modified_base (1)..(3): LNA nucleoside
  modified_base (12)..(14): LNA nucleoside
ggaaaagactgccc

SEQ ID NO: 2590 - DNA, 14 bp, Artificial Sequence
  oligonucleotide - internucleotide bonds are phosphorothioate bonds (PS)
  modified_base (1)..(3): LNA nucleoside
  modified_base (11)..(14): LNA nucleoside
ggaaaagactgccc

SEQ ID NO: 2591 - DNA, 15 bp, Artificial Sequence
  oligonucleotide - internucleotide bonds are phosphorothioate bonds (PS)
  modified_base (1)..(2): LNA nucleoside
  modified_base (14)..(15): LNA nucleoside
aggaaaagactgccc

SEQ ID NO: 2592 - DNA, 15 bp, Artificial Sequence
  oligonucleotide - internucleotide bonds are phosphorothioate bonds (PS)
  modified_base (1)..(2): LNA nucleoside
  modified_base (13)..(15): LNA nucleoside
aggaaaagactgccc

SEQ ID NO: 2593 - DNA, 15 bp, Artificial Sequence
  oligonucleotide - internucleotide bonds are phosphorothioate bonds (PS)
  modified_base (1)..(2): LNA nucleoside
  modified_base (12)..(15): LNA nucleoside
aggaaaagactgccc

SEQ ID NO: 2594 - DNA, 16 bp, Artificial Sequence
  oligonucleotide - internucleotide bonds are phosphorothioate bonds (PS)
  modified_base (1)..(2): LNA nucleoside
  modified_base (15)..(16): LNA nucleoside
caggaaaagactgccc

SEQ ID NO: 2595 - DNA, 16 bp, Artificial Sequence
  oligonucleotide - internucleotide bonds are phosphorothioate bonds (PS)
  modified_base (1)..(3): LNA nucleoside
  modified_base (15)..(16): LNA nucleoside
caggaaaagactgccc

SEQ ID NO: 2596 - DNA, 16 bp, Artificial Sequence
  oligonucleotide - internucleotide bonds are phosphorothioate bonds (PS)
  modified_base (1)..(4): LNA nucleoside
  modified_base (15)..(16): LNA nucleoside
caggaaaagactgccc

SEQ ID NO: 2597 - DNA, 15 bp, Artificial Sequence
  oligonucleotide - internucleotide bonds are phosphorothioate bonds (PS)
  modified_base (1)..(2): LNA nucleoside
  modified_base (14)..(15): LNA nucleoside
gtggtcctgggcccc

SEQ ID NO: 2598 - DNA, 15 bp, Artificial Sequence
  oligonucleotide - internucleotide bonds are phosphorothioate bonds (PS)
  modified_base (1)..(3): LNA nucleoside
  modified_base (14)..(15): LNA nucleoside
gtggtcctgggcccc

SEQ ID NO: 2599 - DNA, 15 bp, Artificial Sequence
  oligonucleotide - internucleotide bonds are phosphorothioate bonds (PS)
  modified_base (1)..(2): LNA nucleoside
  modified_base (13)..(15): LNA nucleoside
gtggtcctgggcccc

SEQ ID NO: 2600 - DNA, 14 bp, Artificial Sequence
  oligonucleotide - internucleotide bonds are phosphorothioate bonds (PS)
  modified_base (1)..(3): LNA nucleoside
  modified_base (13)..(14): LNA nucleoside
agttatgtaacccc

SEQ ID NO: 2601 - DNA, 14 bp, Artificial Sequence
  oligonucleotide - internucleotide bonds are phosphorothioate bonds (PS)
  modified_base (1)..(3): LNA nucleoside
  modified_base (12)..(14): LNA nucleoside
agttatgtaacccc

SEQ ID NO: 2602 - DNA, 14 bp, Artificial Sequence
  oligonucleotide - internucleotide bonds are phosphorothioate bonds (PS)
  modified_base (1)..(3): LNA nucleoside
  modified_base (11)..(14): LNA nucleoside
agttatgtaacccc

SEQ ID NO: 2603 - DNA, 15 bp, Artificial Sequence
  oligonucleotide - internucleotide bonds are phosphorothioate bonds (PS)
  modified_base (1)..(2): LNA nucleoside
  modified_base (14)..(15): LNA nucleoside
cagttatgtaacccc

SEQ ID NO: 2604 - DNA, 15 bp, Artificial Sequence
  oligonucleotide - internucleotide bonds are phosphorothioate bonds (PS)
  modified_base (1)..(2): LNA nucleoside
  modified_base (13)..(15): LNA nucleoside
cagttatgtaacccc

SEQ ID NO: 2605 - DNA, 15 bp, Artificial Sequence
  oligonucleotide - internucleotide bonds are phosphorothioate bonds (PS)
  modified_base (1)..(2): LNA nucleoside
  modified_base (12)..(15): LNA nucleoside
cagttatgtaacccc

SEQ ID NO: 2606 - DNA, 14 bp, Artificial Sequence
  oligonucleotide - internucleotide bonds are phosphorothioate bonds (PS)
  modified_base (1)..(2): LNA nucleoside
  modified_base (12)..(14): LNA nucleoside
cagttatgtaaccc

SEQ ID NO: 2607 - DNA, 14 bp, Artificial Sequence
  oligonucleotide - internucleotide bonds are phosphorothioate bonds (PS)
  modified_base (1)..(3): LNA nucleoside
  modified_base (11)..(14): LNA nucleoside
cagttatgtaaccc

SEQ ID NO: 2608 - DNA, 14 bp, Artificial Sequence
  oligonucleotide - internucleotide bonds are phosphorothioate bonds (PS)
  modified_base (1)..(4): LNA nucleoside
  modified_base (11)..(14): LNA nucleoside
cagttatgtaaccc

SEQ ID NO: 2609 - DNA, 15 bp, Artificial Sequence
  oligonucleotide - internucleotide bonds are phosphorothioate bonds (PS)
  modified_base (1)..(4): LNA nucleoside
  modified_base (13)..(15): LNA nucleoside
taaaaagaggaaccc

SEQ ID NO: 2610 - DNA, 15 bp, Artificial Sequence
  oligonucleotide - internucleotide bonds are phosphorothioate bonds (PS)
  modified_base (1)..(3): LNA nucleoside
  modified_base (12)..(15): LNA nucleoside
taaaaagaggaaccc

SEQ ID NO: 2611 - DNA, 15 bp, Artificial Sequence
  oligonucleotide - internucleotide bonds are phosphorothioate bonds (PS)
  modified_base (1)..(4): LNA nucleoside
  modified_base (12)..(15): LNA nucleoside
taaaaagaggaaccc

SEQ ID NO: 2612 - DNA, 14 bp, Artificial Sequence
  oligonucleotide - internucleotide bonds are phosphorothioate bonds (PS)
  modified_base (1)..(4): LNA nucleoside
  modified_base (12)..(14): LNA nucleoside
ctgatattcttacc

SEQ ID NO: 2613 - DNA, 14 bp, Artificial Sequence
  oligonucleotide - internucleotide bonds are phosphorothioate bonds (PS)
  modified_base (1)..(3): LNA nucleoside
  modified_base (11)..(14): LNA nucleoside
ctgatattcttacc

SEQ ID NO: 2614 - DNA, 14 bp, Artificial Sequence
  oligonucleotide - internucleotide bonds are phosphorothioate bonds (PS)
  modified_base (1)..(4): LNA nucleoside
  modified_base (11)..(14): LNA nucleoside
ctgatattcttacc

SEQ ID NO: 2615 - DNA, 14 bp, Artificial Sequence
  oligonucleotide - internucleotide bonds are phosphorothioate bonds (PS)
  modified_base (1)..(2): LNA nucleoside
  modified_base (13)..(14): LNA nucleoside
cctgggtgtgcacc

SEQ ID NO: 2616 - DNA, 14 bp, Artificial Sequence
  oligonucleotide - internucleotide bonds are phosphorothioate bonds (PS)
  modified_base (1)..(2): LNA nucleoside
  modified_base (12)..(14): LNA nucleoside
cctgggtgtgcacc

SEQ ID NO: 2617 - DNA, 14 bp, Artificial Sequence
  oligonucleotide - internucleotide bonds are phosphorothioate bonds (PS)
  modified_base (1)..(3): LNA nucleoside
  modified_base (13)..(14): LNA nucleoside
cctgggtgtgcacc

SEQ ID NO: 2618 - DNA, 14 bp, Artificial Sequence
  oligonucleotide - internucleotide bonds are phosphorothioate bonds (PS)
  modified_base (1)..(3): LNA nucleoside
  modified_base (13)..(14): LNA nucleoside
taggctgtgaaacc

SEQ ID NO: 2619 - DNA, 14 bp, Artificial Sequence
  oligonucleotide - internucleotide bonds are phosphorothioate bonds (PS)
  modified_base (1)..(3): LNA nucleoside
  modified_base (11)..(14): LNA nucleoside
taggctgtgaaacc

SEQ ID NO: 2620 - DNA, 14 bp, Artificial Sequence
  oligonucleotide - internucleotide bonds are phosphorothioate bonds (PS)
  modified_base (1)..(4): LNA nucleoside
  modified_base (11)..(14): LNA nucleoside
taggctgtgaaacc

SEQ ID NO: 2621 - DNA, 15 bp, Artificial Sequence
  oligonucleotide - internucleotide bonds are phosphorothioate bonds (PS)
  modified_base (1)..(3): LNA nucleoside
  modified_base (12)..(15): LNA nucleoside
taattttccttgtac

SEQ ID NO: 2622 - DNA, 15 bp, Artificial Sequence
  oligonucleotide - internucleotide bonds are phosphorothioate bonds (PS)
  modified_base (1)..(4): LNA nucleoside
  modified_base (13)..(15): LNA nucleoside
taattttccttgtac

SEQ ID NO: 2623 - DNA, 15 bp, Artificial Sequence
  oligonucleotide - internucleotide bonds are phosphorothioate bonds (PS)
  modified_base (1)..(4): LNA nucleoside
  modified_base (12)..(15): LNA nucleoside
taattttccttgtac

SEQ ID NO: 2624 - DNA, 16 bp, Artificial Sequence
  oligonucleotide - internucleotide bonds are phosphorothioate bonds (PS)
  modified_base (1)..(3): LNA nucleoside
  modified_base (14)..(16): LNA nucleoside
ctaattttccttgtac

SEQ ID NO: 2625 - DNA, 16 bp, Artificial Sequence
  oligonucleotide - internucleotide bonds are phosphorothioate bonds (PS)
  modified_base (1)..(4): LNA nucleoside
  modified_base (14)..(16): LNA nucleoside
ctaattttccttgtac

SEQ ID NO: 2626 - DNA, 16 bp, Artificial Sequence
  oligonucleotide - internucleotide bonds are phosphorothioate bonds (PS)
  modified_base (1)..(4): LNA nucleoside
  modified_base (13)..(16): LNA nucleoside
ctaattttccttgtac

SEQ ID NO: 2627 - DNA, 14 bp, Artificial Sequence
  oligonucleotide - internucleotide bonds are phosphorothioate bonds (PS)
  modified_base (1)..(4): LNA nucleoside
  modified_base (12)..(14): LNA nucleoside
tccataacttctac

SEQ ID NO: 2628 - DNA, 14 bp, Artificial Sequence
  oligonucleotide - internucleotide bonds are phosphorothioate bonds (PS)
  modified_base (1)..(3): LNA nucleoside
  modified_base (11)..(14): LNA nucleoside
tccataacttctac

SEQ ID NO: 2629 - DNA, 14 bp, Artificial Sequence
  oligonucleotide - internucleotide bonds are phosphorothioate bonds (PS)
  modified_base (1)..(4): LNA nucleoside
  modified_base (11)..(14): LNA nucleoside
tccataacttctac

SEQ ID NO: 2630 - DNA, 15 bp, Artificial Sequence
  oligonucleotide - internucleotide bonds are phosphorothioate bonds (PS)
  modified_base (1)..(3): LNA nucleoside
  modified_base (13)..(15): LNA nucleoside
tatttttctgcctac

SEQ ID NO: 2631 - DNA, 15 bp, Artificial Sequence
  oligonucleotide - internucleotide bonds are phosphorothioate bonds (PS)
  modified_base (1)..(3): LNA nucleoside
  modified_base (12)..(15): LNA nucleoside
tatttttctgcctac

SEQ ID NO: 2632 - DNA, 15 bp, Artificial Sequence
  oligonucleotide - internucleotide bonds are phosphorothioate bonds (PS)
  modified_base (1)..(4): LNA nucleoside
  modified_base (12)..(15): LNA nucleoside
tatttttctgcctac

SEQ ID NO: 2633 - DNA, 16 bp, Artificial Sequence
  oligonucleotide - internucleotide bonds are phosphorothioate bonds (PS)
  modified_base (1)..(4): LNA nucleoside
  modified_base (15)..(16): LNA nucleoside
ttatttttctgcctac

SEQ ID NO: 2634 - DNA, 16 bp, Artificial Sequence
  oligonucleotide - internucleotide bonds are phosphorothioate bonds (PS)
  modified_base (1)..(4): LNA nucleoside
  modified_base (14)..(16): LNA nucleoside
ttatttttctgcctac

SEQ ID NO: 2635 - DNA, 16 bp, Artificial Sequence
  oligonucleotide - internucleotide bonds are phosphorothioate bonds (PS)
  modified_base (1)..(4): LNA nucleoside
  modified_base (13)..(16): LNA nucleoside
ttatttttctgcctac

SEQ ID NO: 2636 - DNA, 15 bp, Artificial Sequence
  oligonucleotide - internucleotide bonds are phosphorothioate bonds (PS)
  modified_base (1)..(3): LNA nucleoside
  modified_base (12)..(15): LNA nucleoside
gtgtttgttttatac

SEQ ID NO: 2637 - DNA, 15 bp, Artificial Sequence
  oligonucleotide - internucleotide bonds are phosphorothioate bonds (PS)
  modified_base (1)..(4): LNA nucleoside
  modified_base (13)..(15): LNA nucleoside
gtgtttgttttatac

SEQ ID NO: 2638 - DNA, 15 bp, Artificial Sequence
  oligonucleotide - internucleotide bonds are phosphorothioate bonds (PS)
  modified_base (1)..(4): LNA nucleoside
  modified_base (12)..(15): LNA nucleoside
gtgtttgttttatac

SEQ ID NO: 2639 - DNA, 14 bp, Artificial Sequence
  oligonucleotide - internucleotide bonds are phosphorothioate bonds (PS)
  modified_base (1)..(2): LNA nucleoside
  modified_base (12)..(14): LNA nucleoside
agccatagccatac

SEQ ID NO: 2640 - DNA, 14 bp, Artificial Sequence
  oligonucleotide - internucleotide bonds are phosphorothioate bonds (PS)
  modified_base (1)..(3): LNA nucleoside
  modified_base (12)..(14): LNA nucleoside
agccatagccatac

SEQ ID NO: 2641 - DNA, 14 bp, Artificial Sequence
  oligonucleotide - internucleotide bonds are phosphorothioate bonds (PS)
  modified_base (1)..(4): LNA nucleoside
  modified_base (12)..(14): LNA nucleoside
agccatagccatac

SEQ ID NO: 2642 - DNA, 14 bp, Artificial Sequence
  oligonucleotide - internucleotide bonds are phosphorothioate bonds (PS)
  modified_base (1)..(2): LNA nucleoside
  modified_base (12)..(14): LNA nucleoside
ttcctggtagggac

SEQ ID NO: 2643 - DNA, 14 bp, Artificial Sequence
  oligonucleotide - internucleotide bonds are phosphorothioate bonds (PS)
  modified_base (1)..(4): LNA nucleoside
  modified_base (13)..(14): LNA nucleoside
ttcctggtagggac

SEQ ID NO: 2644 - DNA, 14 bp, Artificial Sequence
  oligonucleotide - internucleotide bonds are phosphorothioate bonds (PS)
  modified_base (1)..(4): LNA nucleoside
  modified_base (12)..(14): LNA nucleoside
ttcctggtagggac

SEQ ID NO: 2645 - DNA, 15 bp, Artificial Sequence
  oligonucleotide - internucleotide bonds are phosphorothioate bonds (PS)
  modified_base (1)..(2): LNA nucleoside
  modified_base (14)..(15): LNA nucleoside
gttcctggtagggac

SEQ ID NO: 2646 - DNA, 15 bp, Artificial Sequence
  oligonucleotide - internucleotide bonds are phosphorothioate bonds (PS)
  modified_base (1)..(2): LNA nucleoside
  modified_base (13)..(15): LNA nucleoside
gttcctggtagggac

SEQ ID NO: 2647 - DNA, 15 bp, Artificial Sequence
  oligonucleotide - internucleotide bonds are phosphorothioate bonds (PS)
  modified_base (1)..(4): LNA nucleoside
  modified_base (13)..(15): LNA nucleoside
gttcctggtagggac

SEQ ID NO: 2648 - DNA, 14 bp, Artificial Sequence
  oligonucleotide - internucleotide bonds are phosphorothioate bonds (PS)
  modified_base (1)..(3): LNA nucleoside
  modified_base (13)..(14): LNA nucleoside
atgcctctgaggac

SEQ ID NO: 2649 - DNA, 14 bp, Artificial Sequence
  oligonucleotide - internucleotide bonds are phosphorothioate bonds (PS)
  modified_base (1)..(3): LNA nucleoside
  modified_base (12)..(14): LNA nucleoside
atgcctctgaggac

SEQ ID NO: 2650 - DNA, 14 bp, Artificial Sequence
  oligonucleotide - internucleotide bonds are phosphorothioate bonds (PS)
  modified_base (1)..(4): LNA nucleoside
  modified_base (12)..(14): LNA nucleoside
atgcctctgaggac

SEQ ID NO: 2651 - DNA, 14 bp, Artificial Sequence
  oligonucleotide - internucleotide bonds are phosphorothioate bonds (PS)
  modified_base (1)..(2): LNA nucleoside
  modified_base (13)..(14): LNA nucleoside
gctgctaccaggac

SEQ ID NO: 2652 - DNA, 14 bp, Artificial Sequence
  oligonucleotide - internucleotide bonds are phosphorothioate bonds (PS)
  modified_base (1)..(2): LNA nucleoside
  modified_base (12)..(14): LNA nucleoside
gctgctaccaggac

SEQ ID NO: 2653 - DNA, 14 bp, Artificial Sequence
  oligonucleotide - internucleotide bonds are phosphorothioate bonds (PS)
  modified_base (1)..(2): LNA nucleoside
  modified_base (11)..(14): LNA nucleoside
gctgctaccaggac

SEQ ID NO: 2654 - DNA, 15 bp, Artificial Sequence
  oligonucleotide - internucleotide bonds are phosphorothioate bonds (PS)
  modified_base (1)..(2): LNA nucleoside
  modified_base (14)..(15): LNA nucleoside
ggctgctaccaggac

SEQ ID NO: 2655 - DNA, 15 bp, Artificial Sequence
  oligonucleotide - internucleotide bonds are phosphorothioate bonds (PS)
  modified_base (1)..(2): LNA nucleoside
  modified_base (13)..(15): LNA nucleoside
ggctgctaccaggac

SEQ ID NO: 2656 - DNA, 15 bp, Artificial Sequence
  oligonucleotide - internucleotide bonds are phosphorothioate bonds (PS)
  modified_base (1)..(3): LNA nucleoside
  modified_base (14)..(15): LNA nucleoside
ggctgctaccaggac

SEQ ID NO: 2657 - DNA, 16 bp, Artificial Sequence
  oligonucleotide - internucleotide bonds are phosphorothioate bonds (PS)
  modified_base (1)..(2): LNA nucleoside
  modified_base (15)..(16): LNA nucleoside
aggctgctaccaggac

SEQ ID NO: 2658 - DNA, 16 bp, Artificial Sequence
  oligonucleotide - internucleotide bonds are phosphorothioate bonds (PS)
  modified_base (1)..(3): LNA nucleoside
  modified_base (15)..(16): LNA nucleoside
aggctgctaccaggac

SEQ ID NO: 2659 - DNA, 16 bp, Artificial Sequence
  oligonucleotide - internucleotide bonds are phosphorothioate bonds (PS)
  modified_base (1)..(2): LNA nucleoside
  modified_base (14)..(16): LNA nucleoside
aggctgctaccaggac

SEQ ID NO: 2660 - DNA, 14 bp, Artificial Sequence
  oligonucleotide - internucleotide bonds are phosphorothioate bonds (PS)
  modified_base (1)..(2): LNA nucleoside
  modified_base (11)..(14): LNA nucleoside
tcctacaggtagac

SEQ ID NO: 2661 - DNA, 14 bp, Artificial Sequence
  oligonucleotide - internucleotide bonds are phosphorothioate bonds (PS)
  modified_base (1)..(3): LNA nucleoside
  modified_base (11)..(14): LNA nucleoside
tcctacaggtagac

SEQ ID NO: 2662 - DNA, 14 bp, Artificial Sequence
  oligonucleotide - internucleotide bonds are phosphorothioate bonds (PS)
  modified_base (1)..(4): LNA nucleoside
  modified_base (11)..(14): LNA nucleoside
tcctacaggtagac

SEQ ID NO: 2663 - DNA, 15 bp, Artificial Sequence
  oligonucleotide - internucleotide bonds are phosphorothioate bonds (PS)
  modified_base (1)..(2): LNA nucleoside
  modified_base (12)..(15): LNA nucleoside
atcctacaggtagac

SEQ ID NO: 2664 - DNA, 15 bp, Artificial Sequence
  oligonucleotide - internucleotide bonds are phosphorothioate bonds (PS)
  modified_base (1)..(3): LNA nucleoside
  modified_base (12)..(15): LNA nucleoside
atcctacaggtagac

SEQ ID NO: 2665 - DNA, 15 bp, Artificial Sequence
  oligonucleotide - internucleotide bonds are phosphorothioate bonds (PS)
  modified_base (1)..(4): LNA nucleoside
  modified_base (12)..(15): LNA nucleoside
atcctacaggtagac

SEQ ID NO: 2666 - DNA, 14 bp, Artificial Sequence
  oligonucleotide - internucleotide bonds are phosphorothioate bonds (PS)
  modified_base (1)..(4): LNA nucleoside
  modified_base (13)..(14): LNA nucleoside
gctgcaaagtagac

SEQ ID NO: 2667 - DNA, 14 bp, Artificial Sequence
  oligonucleotide - internucleotide bonds are phosphorothioate bonds (PS)
  modified_base (1)..(3): LNA nucleoside
  modified_base (11)..(14): LNA nucleoside
gctgcaaagtagac

SEQ ID NO: 2668 - DNA, 14 bp, Artificial Sequence
  oligonucleotide - internucleotide bonds are phosphorothioate bonds (PS)
  modified_base (1)..(4): LNA nucleoside
  modified_base (11)..(14): LNA nucleoside
gctgcaaagtagac

SEQ ID NO: 2669 - DNA, 14 bp, Artificial Sequence
  oligonucleotide - internucleotide bonds are phosphorothioate bonds (PS)
  modified_base (1)..(4): LNA nucleoside
  modified_base (12)..(14): LNA nucleoside
ttacaaccatagac

SEQ ID NO: 2670 - DNA, 14 bp, Artificial Sequence
  oligonucleotide - internucleotide bonds are phosphorothioate bonds (PS)
  modified_base (1)..(3): LNA nucleoside
  modified_base (11)..(14): LNA nucleoside
ttacaaccatagac

SEQ ID NO: 2671 - DNA, 14 bp, Artificial Sequence
  oligonucleotide - internucleotide bonds are phosphorothioate bonds (PS)
  modified_base (1)..(4): LNA nucleoside
  modified_base (11)..(14): LNA nucleoside
ttacaaccatagac

SEQ ID NO: 2672 - DNA, 15 bp, Artificial Sequence
  oligonucleotide - internucleotide bonds are phosphorothioate bonds (PS)
  modified_base (1)..(2): LNA nucleoside
  modified_base (12)..(15): LNA nucleoside
tgttgcaacagagac

SEQ ID NO: 2673 - DNA, 15 bp, Artificial Sequence
  oligonucleotide - internucleotide bonds are phosphorothioate bonds (PS)
  modified_base (1)..(4): LNA nucleoside
  modified_base (13)..(15): LNA nucleoside
tgttgcaacagagac

SEQ ID NO: 2674 - DNA, 15 bp, Artificial Sequence
  oligonucleotide - internucleotide bonds are phosphorothioate bonds (PS)
  modified_base (1)..(4): LNA nucleoside
  modified_base (12)..(15): LNA nucleoside
tgttgcaacagagac

SEQ ID NO: 2675 - DNA, 16 bp, Artificial Sequence
  oligonucleotide - internucleotide bonds are phosphorothioate bonds (PS)
  modified_base (1)..(4): LNA nucleoside
  modified_base (15)..(16): LNA nucleoside
ttgttgcaacagagac

SEQ ID NO: 2676 - DNA, 16 bp, Artificial Sequence
  oligonucleotide - internucleotide bonds are phosphorothioate bonds (PS)
  modified_base (1)..(3): LNA nucleoside
  modified_base (13)..(16): LNA nucleoside
ttgttgcaacagagac

SEQ ID NO: 2677 - DNA, 16 bp, Artificial Sequence
  oligonucleotide - internucleotide bonds are phosphorothioate bonds (PS)
  modified_base (1)..(4): LNA nucleoside
  modified_base (13)..(16): LNA nucleoside
ttgttgcaacagagac

SEQ ID NO: 2678 - DNA, 15 bp, Artificial Sequence
  oligonucleotide - internucleotide bonds are phosphorothioate bonds (PS)
  modified_base (1)..(3): LNA nucleoside
  modified_base (13)..(15): LNA nucleoside
ttctggttctatcac

SEQ ID NO: 2679 - DNA, 15 bp, Artificial Sequence
  oligonucleotide - internucleotide bonds are phosphorothioate bonds (PS)
  modified_base (1)..(3): LNA nucleoside
  modified_base (12)..(15): LNA nucleoside
ttctggttctatcac

SEQ ID NO: 2680 - DNA, 15 bp, Artificial Sequence
  oligonucleotide - internucleotide bonds are phosphorothioate bonds (PS)
  modified_base (1)..(4): LNA nucleoside
  modified_base (12)..(15): LNA nucleoside
ttctggttctatcac

SEQ ID NO: 2681 - DNA, 14 bp, Artificial Sequence
  oligonucleotide - internucleotide bonds are phosphorothioate bonds (PS)
  modified_base (1)..(2): LNA nucleoside
  modified_base (11)..(14): LNA nucleoside
aaattcatgggcac

SEQ ID NO: 2682 - DNA, 14 bp, Artificial Sequence
  oligonucleotide - internucleotide bonds are phosphorothioate bonds (PS)
  modified_base (1)..(3): LNA nucleoside
  modified_base (11)..(14): LNA nucleoside
aaattcatgggcac

SEQ ID NO: 2683 - DNA, 14 bp, Artificial Sequence
  oligonucleotide - internucleotide bonds are phosphorothioate bonds (PS)
  modified_base (1)..(4): LNA nucleoside
  modified_base (11)..(14): LNA nucleoside
aaattcatgggcac

SEQ ID NO: 2684 - DNA, 14 bp, Artificial Sequence
  oligonucleotide - internucleotide bonds are phosphorothioate bonds (PS)
  modified_base (1)..(2): LNA nucleoside
  modified_base (13)..(14): LNA nucleoside
  modified_base (8)..(8): 5-methyl cytosine
agcaggccgcccac

SEQ ID NO: 2685 - DNA, 14 bp, Artificial Sequence
  oligonucleotide - internucleotide bonds are phosphorothioate bonds (PS)
  modified_base (1)..(2): LNA nucleoside
  modified_base (12)..(14): LNA nucleoside
  modified_base (8)..(8): 5-methyl cytosine
agcaggccgcccac

SEQ ID NO: 2686 - DNA, 14 bp, Artificial Sequence
  oligonucleotide - internucleotide bonds are phosphorothioate bonds (PS)
  modified_base (1)..(3): LNA nucleoside
  modified_base (13)..(14): LNA nucleoside
  modified_base (8)..(8): 5-methyl cytosine
agcaggccgcccac

SEQ ID NO: 2687 - DNA, 15 bp, Artificial Sequence
  oligonucleotide - internucleotide bonds are phosphorothioate bonds (PS)
  modified_base (1)..(2): LNA nucleoside
  modified_base (14)..(15): LNA nucleoside
  modified_base (9)..(9): 5-methyl cytosine
cagcaggccgcccac

SEQ ID NO: 2688 - DNA, 15 bp, Artificial Sequence
  oligonucleotide - internucleotide bonds are phosphorothioate bonds (PS)
  modified_base (1)..(3): LNA nucleoside
  modified_base (14)..(15): LNA nucleoside
  modified_base (9)..(9): 5-methyl cytosine
cagcaggccgcccac

SEQ ID NO: 2689 - DNA, 15 bp, Artificial Sequence
  oligonucleotide - internucleotide bonds are phosphorothioate bonds (PS)
  modified_base (1)..(2): LNA nucleoside
  modified_base (13)..(15): LNA nucleoside
  modified_base (9)..(9): 5-methyl cytosine
cagcaggccgcccac

SEQ ID NO: 2690 - DNA, 16 bp, Artificial Sequence
  oligonucleotide - internucleotide bonds are phosphorothioate bonds (PS)
  modified_base (1)..(2): LNA nucleoside
  modified_base (15)..(16): LNA nucleoside
  modified_base (10)..(10): 5-methyl cytosine
ccagcaggccgcccac

SEQ ID NO: 2691 - DNA, 16 bp, Artificial Sequence
  oligonucleotide - internucleotide bonds are phosphorothioate bonds (PS)
  modified_base (1)..(3): LNA nucleoside
  modified_base (15)..(16): LNA nucleoside
  modified_base (10)..(10): 5-methyl cytosine
ccagcaggccgcccac

SEQ ID NO: 2692 - DNA, 16 bp, Artificial Sequence
  oligonucleotide - internucleotide bonds are phosphorothioate bonds (PS)
  modified_base (1)..(2): LNA nucleoside
  modified_base (14)..(16): LNA nucleoside
  modified_base (10)..(10): 5-methyl cytosine
ccagcaggccgcccac

SEQ ID NO: 2693 - DNA, 14 bp, Artificial Sequence
  oligonucleotide - internucleotide bonds are phosphorothioate bonds (PS)
  modified_base (1)..(3): LNA nucleoside
  modified_base (12)..(14): LNA nucleoside
ttatgtaaccccac

SEQ ID NO: 2694 - DNA, 14 bp, Artificial Sequence
  oligonucleotide - internucleotide bonds are phosphorothioate bonds (PS)
  modified_base (1)..(4): LNA nucleoside
  modified_base (12)..(14): LNA nucleoside
ttatgtaaccccac

SEQ ID NO: 2695 - DNA, 14 bp, Artificial Sequence
  oligonucleotide - internucleotide bonds are phosphorothioate bonds (PS)
  modified_base (1)..(4): LNA nucleoside
  modified_base (11)..(14): LNA nucleoside
ttatgtaaccccac

SEQ ID NO: 2696 - DNA, 15 bp, Artificial Sequence
  oligonucleotide - internucleotide bonds are phosphorothioate bonds (PS)
  modified_base (1)..(3): LNA nucleoside
  modified_base (14)..(15): LNA nucleoside
gttatgtaaccccac

SEQ ID NO: 2697 - DNA, 15 bp, Artificial Sequence
  oligonucleotide - internucleotide bonds are phosphorothioate bonds (PS)
  modified_base (1)..(3): LNA nucleoside
  modified_base (13)..(15): LNA nucleoside
gttatgtaaccccac

SEQ ID NO: 2698 - DNA, 15 bp, Artificial Sequence
  oligonucleotide - internucleotide bonds are phosphorothioate bonds (PS)
  modified_base (1)..(3): LNA nucleoside
  modified_base (12)..(15): LNA nucleoside
gttatgtaaccccac

SEQ ID NO: 2699 - DNA, 16 bp, Artificial Sequence
  oligonucleotide - internucleotide bonds are phosphorothioate bonds (PS)
  modified_base (1)..(2): LNA nucleoside
  modified_base (15)..(16): LNA nucleoside
agttatgtaaccccac

SEQ ID NO: 2700 - DNA, 16 bp, Artificial Sequence
  oligonucleotide - internucleotide bonds are phosphorothioate bonds (PS)
  modified_base (1)..(4): LNA nucleoside
  modified_base (15)..(16): LNA nucleoside
agttatgtaaccccac

SEQ ID NO: 2701 - DNA, 16 bp, Artificial Sequence
  oligonucleotide - internucleotide bonds are phosphorothioate bonds (PS)
  modified_base (1)..(4): LNA nucleoside
  modified_base (14)..(16): LNA nucleoside
agttatgtaaccccac

SEQ ID NO: 2702 - DNA, 17 bp, Artificial Sequence
  oligonucleotide - internucleotide bonds are phosphorothioate bonds (PS)
  modified_base (1)..(2): LNA nucleoside
  modified_base (16)..(17): LNA nucleoside
cagttatgtaaccccac

SEQ ID NO: 2703 - DNA, 17 bp, Artificial Sequence
  oligonucleotide - internucleotide bonds are phosphorothioate bonds (PS)
  modified_base (1)..(3): LNA nucleoside
  modified_base (16)..(17): LNA nucleoside
cagttatgtaaccccac

SEQ ID NO: 2704 - DNA, 17 bp, Artificial Sequence
  oligonucleotide - internucleotide bonds are phosphorothioate bonds (PS)
  modified_base (1)..(3): LNA nucleoside
  modified_base (15)..(17): LNA nucleoside
cagttatgtaaccccac

SEQ ID NO: 2705 - DNA, 15 bp, Artificial Sequence
  oligonucleotide - internucleotide bonds are phosphorothioate bonds (PS)
  modified_base (1)..(3): LNA nucleoside
  modified_base (12)..(15): LNA nucleoside
aacaataccagacac

SEQ ID NO: 2706 - DNA, 15 bp, Artificial Sequence
  oligonucleotide - internucleotide bonds are phosphorothioate bonds (PS)
  modified_base (1)..(4): LNA nucleoside
  modified_base (13)..(15): LNA nucleoside
aacaataccagacac

SEQ ID NO: 2707 - DNA, 15 bp, Artificial Sequence
  oligonucleotide - internucleotide bonds are phosphorothioate bonds (PS)
  modified_base (1)..(4): LNA nucleoside
  modified_base (12)..(15): LNA nucleoside
aacaataccagacac

SEQ ID NO: 2708 - DNA, 15 bp, Artificial Sequence
  oligonucleotide - internucleotide bonds are phosphorothioate bonds (PS)
  modified_base (1)..(4): LNA nucleoside
  modified_base (13)..(15): LNA nucleoside
tgaacagacagacac

SEQ ID NO: 2709 - DNA, 15 bp, Artificial Sequence
  oligonucleotide - internucleotide bonds are phosphorothioate bonds (PS)
  modified_base (1)..(3): LNA nucleoside
  modified_base (12)..(15): LNA nucleoside
tgaacagacagacac

SEQ ID NO: 2710 - DNA, 15 bp, Artificial Sequence
  oligonucleotide - internucleotide bonds are phosphorothioate bonds (PS)
  modified_base (1)..(4): LNA nucleoside
  modified_base (12)..(15): LNA nucleoside
tgaacagacagacac

SEQ ID NO: 2711 - DNA, 14 bp, Artificial Sequence
  oligonucleotide - internucleotide bonds are phosphorothioate bonds (PS)
  modified_base (1)..(4): LNA nucleoside
  modified_base (12)..(14): LNA nucleoside
agataggctgtaac

SEQ ID NO: 2712 - DNA, 14 bp, Artificial Sequence
  oligonucleotide - internucleotide bonds are phosphorothioate bonds (PS)
  modified_base (1)..(3): LNA nucleoside
  modified_base (11)..(14): LNA nucleoside
agataggctgtaac

SEQ ID NO: 2713 - DNA, 14 bp, Artificial Sequence
  oligonucleotide - internucleotide bonds are phosphorothioate bonds (PS)
  modified_base (1)..(4): LNA nucleoside
  modified_base (11)..(14): LNA nucleoside
agataggctgtaac

SEQ ID NO: 2714 - DNA, 15 bp, Artificial Sequence
  oligonucleotide - internucleotide bonds are phosphorothioate bonds (PS)
  modified_base (1)..(4): LNA nucleoside
  modified_base (14)..(15): LNA nucleoside
gagataggctgtaac

SEQ ID NO: 2715 - DNA, 15 bp, Artificial Sequence
  oligonucleotide - internucleotide bonds are phosphorothioate bonds (PS)
  modified_base (1)..(3): LNA nucleoside
  modified_base (12)..(15): LNA nucleoside
gagataggctgtaac

SEQ ID NO: 2716 - DNA, 15 bp, Artificial Sequence
  oligonucleotide - internucleotide bonds are phosphorothioate bonds (PS)
  modified_base (1)..(4): LNA nucleoside
  modified_base (12)..(15): LNA nucleoside
gagataggctgtaac

SEQ ID NO: 2717 - DNA, 15 bp, Artificial Sequence
  oligonucleotide - internucleotide bonds are phosphorothioate bonds (PS)
  modified_base (1)..(4): LNA nucleoside
  modified_base (13)..(15): LNA nucleoside
agctgaaattagaac

SEQ ID NO: 2718 - DNA, 15 bp, Artificial Sequence
  oligonucleotide - internucleotide bonds are phosphorothioate bonds (PS)
  modified_base (1)..(3): LNA nucleoside
  modified_base (12)..(15): LNA nucleoside
agctgaaattagaac

SEQ ID NO: 2719 - DNA, 15 bp, Artificial Sequence
  oligonucleotide - internucleotide bonds are phosphorothioate bonds (PS)
  modified_base (1)..(4): LNA nucleoside
  modified_base (12)..(15): LNA nucleoside
agctgaaattagaac

SEQ ID NO: 2720 - DNA, 14 bp, Artificial Sequence
  oligonucleotide - internucleotide bonds are phosphorothioate bonds (PS)
  modified_base (1)..(4): LNA nucleoside
  modified_base (12)..(14): LNA nucleoside
gtttgatgaccaac

SEQ ID NO: 2721 - DNA, 14 bp, Artificial Sequence
  oligonucleotide - internucleotide bonds are phosphorothioate bonds (PS)
  modified_base (1)..(3): LNA nucleoside
  modified_base (11)..(14): LNA nucleoside
gtttgatgaccaac

SEQ ID NO: 2722 - DNA, 14 bp, Artificial Sequence
  oligonucleotide - internucleotide bonds are phosphorothioate bonds (PS)
  modified_base (1)..(4): LNA nucleoside
  modified_base (11)..(14): LNA nucleoside
gtttgatgaccaac

SEQ ID NO: 2723 - DNA, 14 bp, Artificial Sequence
  oligonucleotide - internucleotide bonds are phosphorothioate bonds (PS)
  modified_base (1)..(2): LNA nucleoside
  modified_base (12)..(14): LNA nucleoside
ccctggcttgaaac

SEQ ID NO: 2724 - DNA, 14 bp, Artificial Sequence
  oligonucleotide - internucleotide bonds are phosphorothioate bonds (PS)
  modified_base (1)..(3): LNA nucleoside
  modified_base (12)..(14): LNA nucleoside
ccctggcttgaaac

SEQ ID NO: 2725 - DNA, 14 bp, Artificial Sequence
  oligonucleotide - internucleotide bonds are phosphorothioate bonds (PS)
  modified_base (1)..(4): LNA nucleoside
  modified_base (11)..(14): LNA nucleoside
ccctggcttgaaac

SEQ ID NO: 2726 - DNA, 15 bp, Artificial Sequence
  oligonucleotide - internucleotide bonds are phosphorothioate bonds (PS)
  modified_base (1)..(3): LNA nucleoside
  modified_base (13)..(15): LNA nucleoside
gtcaccttgatttta

SEQ ID NO: 2727 - DNA, 15 bp, Artificial Sequence
  oligonucleotide - internucleotide bonds are phosphorothioate bonds (PS)
  modified_base (1)..(3): LNA nucleoside
  modified_base (12)..(15): LNA nucleoside
gtcaccttgatttta

SEQ ID NO: 2728 - DNA, 15 bp, Artificial Sequence
  oligonucleotide - internucleotide bonds are phosphorothioate bonds (PS)
  modified_base (1)..(4): LNA nucleoside
  modified_base (12)..(15): LNA nucleoside
gtcaccttgatttta

SEQ ID NO: 2729 - DNA, 16 bp, Artificial Sequence
  oligonucleotide - internucleotide bonds are phosphorothioate bonds (PS)
  modified_base (1)..(3): LNA nucleoside
  modified_base (15)..(16): LNA nucleoside
tgtcaccttgatttta

SEQ ID NO: 2730 - DNA, 16 bp, Artificial Sequence
  oligonucleotide - internucleotide bonds are phosphorothioate bonds (PS)
  modified_base (1)..(4): LNA nucleoside
  modified_base (15)..(16): LNA nucleoside
tgtcaccttgatttta

SEQ ID NO: 2731 - DNA, 16 bp, Artificial Sequence
  oligonucleotide - internucleotide bonds are phosphorothioate bonds (PS)
  modified_base (1)..(4): LNA nucleoside
  modified_base (13)..(16): LNA nucleoside
tgtcaccttgatttta

SEQ ID NO: 2732 - DNA, 17 bp, Artificial Sequence
  oligonucleotide - internucleotide bonds are phosphorothioate bonds (PS)
  modified_base (1)..(2): LNA nucleoside
  modified_base (16)..(17): LNA nucleoside
ctgtcaccttgatttta

SEQ ID NO: 2733 - DNA, 17 bp, Artificial Sequence
  oligonucleotide - internucleotide bonds are phosphorothioate bonds (PS)
  modified_base (1)..(3): LNA nucleoside
  modified_base (15)..(17): LNA nucleoside
ctgtcaccttgatttta

SEQ ID NO: 2734 - DNA, 17 bp, Artificial Sequence
  oligonucleotide - internucleotide bonds are phosphorothioate bonds (PS)
  modified_base (1)..(4): LNA nucleoside
  modified_base (14)..(17): LNA nucleoside
ctgtcaccttgatttta

SEQ ID NO: 2735 - DNA, 18 bp, Artificial Sequence
  oligonucleotide - internucleotide bonds are phosphorothioate bonds (PS)
  modified_base (1)..(2): LNA nucleoside
  modified_base (17)..(18): LNA nucleoside
gctgtcaccttgatttta

SEQ ID NO: 2736 - DNA, 18 bp, Artificial Sequence
  oligonucleotide - internucleotide bonds are phosphorothioate bonds (PS)
  modified_base (1)..(2): LNA nucleoside
  modified_base (16)..(18): LNA nucleoside
gctgtcaccttgatttta

SEQ ID NO: 2737 - DNA, 18 bp, Artificial Sequence
  oligonucleotide - internucleotide bonds are phosphorothioate bonds (PS)
  modified_base (1)..(2): LNA nucleoside
  modified_base (15)..(18): LNA nucleoside
gctgtcaccttgatttta

SEQ ID NO: 2738 - DNA, 16 bp, Artificial Sequence
  oligonucleotide - internucleotide bonds are phosphorothioate bonds (PS)
  modified_base (1)..(3): LNA nucleoside
  modified_base (13)..(16): LNA nucleoside
tacattattttgttta

SEQ ID NO: 2739 - DNA, 16 bp, Artificial Sequence
  oligonucleotide - internucleotide bonds are phosphorothioate bonds (PS)
  modified_base (1)..(4): LNA nucleoside
  modified_base (14)..(16): LNA nucleoside
tacattattttgttta

SEQ ID NO: 2740 - DNA, 16 bp, Artificial Sequence
  oligonucleotide - internucleotide bonds are phosphorothioate bonds (PS)
  modified_base (1)..(4): LNA nucleoside
  modified_base (13)..(16): LNA nucleoside
tacattattttgttta

SEQ ID NO: 2741 - DNA, 14 bp, Artificial Sequence
  oligonucleotide - internucleotide bonds are phosphorothioate bonds (PS)
  modified_base (1)..(3): LNA nucleoside
  modified_base (11)..(14): LNA nucleoside
gaggagaggattta

SEQ ID NO: 2742 - DNA, 14 bp, Artificial Sequence
  oligonucleotide - internucleotide bonds are phosphorothioate bonds (PS)
  modified_base (1)..(4): LNA nucleoside
  modified_base (12)..(14): LNA nucleoside
gaggagaggattta

SEQ ID NO: 2743 - DNA, 14 bp, Artificial Sequence
  oligonucleotide - internucleotide bonds are phosphorothioate bonds (PS)
  modified_base (1)..(4): LNA nucleoside
  modified_base (11)..(14): LNA nucleoside
gaggagaggattta

SEQ ID NO: 2744 - DNA, 15 bp, Artificial Sequence
  oligonucleotide - internucleotide bonds are phosphorothioate bonds (PS)
  modified_base (1)..(4): LNA nucleoside
  modified_base (13)..(15): LNA nucleoside
aacacagggaagtta

SEQ ID NO: 2745 - DNA, 15 bp, Artificial Sequence
  oligonucleotide - internucleotide bonds are phosphorothioate bonds (PS)
  modified_base (1)..(3): LNA nucleoside
  modified_base (12)..(15): LNA nucleoside
aacacagggaagtta

SEQ ID NO: 2746 - DNA, 15 bp, Artificial Sequence
  oligonucleotide - internucleotide bonds are phosphorothioate bonds (PS)
  modified_base (1)..(4): LNA nucleoside
  modified_base (12)..(15): LNA nucleoside
aacacagggaagtta

SEQ ID NO: 2747 - DNA, 15 bp, Artificial Sequence
  oligonucleotide - internucleotide bonds are phosphorothioate bonds (PS)
  modified_base (1)..(4): LNA nucleoside
  modified_base (14)..(15): LNA nucleoside
agagttgttttctta

SEQ ID NO: 2748 - DNA, 15 bp, Artificial Sequence
  oligonucleotide - internucleotide bonds are phosphorothioate bonds (PS)
  modified_base (1)..(3): LNA nucleoside
  modified_base (12)..(15): LNA nucleoside
agagttgttttctta

SEQ ID NO: 2749 - DNA, 15 bp, Artificial Sequence
  oligonucleotide - internucleotide bonds are phosphorothioate bonds (PS)
  modified_base (1)..(4): LNA nucleoside
  modified_base (12)..(15): LNA nucleoside
agagttgttttctta

SEQ ID NO: 2750 - DNA, 16 bp, Artificial Sequence
  oligonucleotide - internucleotide bonds are phosphorothioate bonds (PS)
  modified_base (1)..(3): LNA nucleoside
  modified_base (14)..(16): LNA nucleoside
cagagttgttttctta

SEQ ID NO: 2751 - DNA, 16 bp, Artificial Sequence
  oligonucleotide - internucleotide bonds are phosphorothioate bonds (PS)
  modified_base (1)..(3): LNA nucleoside
  modified_base (13)..(16): LNA nucleoside
cagagttgttttctta

SEQ ID NO: 2752 - DNA, 16 bp, Artificial Sequence
  oligonucleotide - internucleotide bonds are phosphorothioate bonds (PS)
  modified_base (1)..(4): LNA nucleoside
  modified_base (13)..(16): LNA nucleoside
cagagttgttttctta

SEQ ID NO: 2753 - DNA, 15 bp, Artificial Sequence
  oligonucleotide - internucleotide bonds are phosphorothioate bonds (PS)
  modified_base (1)..(4): LNA nucleoside
  modified_base (13)..(15): LNA nucleoside
ctaattttccttgta

SEQ ID NO: 2754 - DNA, 15 bp, Artificial Sequence
  oligonucleotide - internucleotide bonds are phosphorothioate bonds (PS)
  modified_base (1)..(3): LNA nucleoside
  modified_base (12)..(15): LNA nucleoside
ctaattttccttgta

SEQ ID NO: 2755 - DNA, 15 bp, Artificial Sequence
  oligonucleotide - internucleotide bonds are phosphorothioate bonds (PS)
  modified_base (1)..(4): LNA nucleoside
  modified_base (12)..(15): LNA nucleoside
ctaattttccttgta

SEQ ID NO: 2756 - DNA, 14 bp, Artificial Sequence
  oligonucleotide - internucleotide bonds are phosphorothioate bonds (PS)
  modified_base (1)..(4): LNA nucleoside
  modified_base (12)..(14): LNA nucleoside
actatgaatgggta

SEQ ID NO: 2757 - DNA, 14 bp, Artificial Sequence
  oligonucleotide - internucleotide bonds are phosphorothioate bonds (PS)
  modified_base (1)..(3): LNA nucleoside
  modified_base (11)..(14): LNA nucleoside
actatgaatgggta

SEQ ID NO: 2758 - DNA, 14 bp, Artificial Sequence
  oligonucleotide - internucleotide bonds are phosphorothioate bonds (PS)
  modified_base (1)..(4): LNA nucleoside
  modified_base (11)..(14): LNA nucleoside
actatgaatgggta

SEQ ID NO: 2759 - DNA, 14 bp, Artificial Sequence
  oligonucleotide - internucleotide bonds are phosphorothioate bonds (PS)
  modified_base (1)..(2): LNA nucleoside
  modified_base (12)..(14): LNA nucleoside
gggagatttctcta

SEQ ID NO: 2760 - DNA, 14 bp, Artificial Sequence
  oligonucleotide - internucleotide bonds are phosphorothioate bonds (PS)
  modified_base (1)..(3): LNA nucleoside
  modified_base (11)..(14): LNA nucleoside
gggagatttctcta

SEQ ID NO: 2761 - DNA, 14 bp, Artificial Sequence
  oligonucleotide - internucleotide bonds are phosphorothioate bonds (PS)
  modified_base (1)..(4): LNA nucleoside
  modified_base (11)..(14): LNA nucleoside
gggagatttctcta

SEQ ID NO: 2762 - DNA, 14 bp, Artificial Sequence
  oligonucleotide - internucleotide bonds are phosphorothioate bonds (PS)
  modified_base (1)..(3): LNA nucleoside
  modified_base (11)..(14): LNA nucleoside
aagcagcttagata

SEQ ID NO: 2763 - DNA, 14 bp, Artificial Sequence
  oligonucleotide - internucleotide bonds are phosphorothioate bonds (PS)
  modified_base (1)..(4): LNA nucleoside
  modified_base (12)..(14): LNA nucleoside
aagcagcttagata

SEQ ID NO: 2764 - DNA, 14 bp, Artificial Sequence
  oligonucleotide - internucleotide bonds are phosphorothioate bonds (PS)
  modified_base (1)..(4): LNA nucleoside
  modified_base (11)..(14): LNA nucleoside
aagcagcttagata

SEQ ID NO: 2765 - DNA, 15 bp, Artificial Sequence
  oligonucleotide - internucleotide bonds are phosphorothioate bonds (PS)
  modified_base (1)..(4): LNA nucleoside
  modified_base (13)..(15): LNA nucleoside
ggacagatgaagata

SEQ ID NO: 2766 - DNA, 15 bp, Artificial Sequence
  oligonucleotide - internucleotide bonds are phosphorothioate bonds (PS)
  modified_base (1)..(3): LNA nucleoside
  modified_base (12)..(15): LNA nucleoside
ggacagatgaagata

SEQ ID NO: 2767 - DNA, 15 bp, Artificial Sequence
  oligonucleotide - internucleotide bonds are phosphorothioate bonds (PS)
  modified_base (1)..(4): LNA nucleoside
  modified_base (12)..(15): LNA nucleoside
ggacagatgaagata

SEQ ID NO: 2768 - DNA, 14 bp, Artificial Sequence
  oligonucleotide - internucleotide bonds are phosphorothioate bonds (PS)
  modified_base (1)..(3): LNA nucleoside
  modified_base (11)..(14): LNA nucleoside
acccacttagaata

SEQ ID NO: 2769 - DNA, 14 bp, Artificial Sequence
  oligonucleotide - internucleotide bonds are phosphorothioate bonds (PS)
  modified_base (1)..(4): LNA nucleoside
  modified_base (12)..(14): LNA nucleoside
acccacttagaata

SEQ ID NO: 2770 - DNA, 14 bp, Artificial Sequence
  oligonucleotide - internucleotide bonds are phosphorothioate bonds (PS)
  modified_base (1)..(4): LNA nucleoside
  modified_base (11)..(14): LNA nucleoside
acccacttagaata

SEQ ID NO: 2771 - DNA, 14 bp, Artificial Sequence
  oligonucleotide - internucleotide bonds are phosphorothioate bonds (PS)
  modified_base (1)..(4): LNA nucleoside
  modified_base (13)..(14): LNA nucleoside
cttgtgtttggtga

SEQ ID NO: 2772 - DNA, 14 bp, Artificial Sequence
  oligonucleotide - internucleotide bonds are phosphorothioate bonds (PS)
  modified_base (1)..(4): LNA nucleoside
  modified_base (12)..(14): LNA nucleoside
cttgtgtttggtga

SEQ ID NO: 2773 - DNA, 14 bp, Artificial Sequence
  oligonucleotide - internucleotide bonds are phosphorothioate bonds (PS)
  modified_base (1)..(4): LNA nucleoside
  modified_base (11)..(14): LNA nucleoside
cttgtgtttggtga

SEQ ID NO: 2774 - DNA, 14 bp, Artificial Sequence
  oligonucleotide - internucleotide bonds are phosphorothioate bonds (PS)
  modified_base (1)..(3): LNA nucleoside
  modified_base (13)..(14): LNA nucleoside
tctgtagctggtga

SEQ ID NO: 2775 - DNA, 14 bp, Artificial Sequence
  oligonucleotide - internucleotide bonds are phosphorothioate bonds (PS)
  modified_base (1)..(2): LNA nucleoside
  modified_base (11)..(14): LNA nucleoside
tctgtagctggtga

SEQ ID NO: 2776 - DNA, 14 bp, Artificial Sequence
  oligonucleotide - internucleotide bonds are phosphorothioate bonds (PS)
  modified_base (1)..(4): LNA nucleoside
  modified_base (11)..(14): LNA nucleoside
tctgtagctggtga

SEQ ID NO: 2777 - DNA, 19 bp, Artificial Sequence
  oligonucleotide - internucleotide bonds are phosphorothioate bonds (PS)
  modified_base (1)..(2): LNA nucleoside
  modified_base (17)..(19): LNA nucleoside
tctatttttaattttctga

SEQ ID NO: 2778 - DNA, 19 bp, Artificial Sequence
  oligonucleotide - internucleotide bonds are phosphorothioate bonds (PS)
  modified_base (1)..(2): LNA nucleoside
  modified_base (16)..(19): LNA nucleoside
tctatttttaattttctga

SEQ ID NO: 2779 - DNA, 19 bp, Artificial Sequence
  oligonucleotide - internucleotide bonds are phosphorothioate bonds (PS)
  modified_base (1)..(4): LNA nucleoside
  modified_base (16)..(19): LNA nucleoside
tctatttttaattttctga

SEQ ID NO: 2780 - DNA, 14 bp, Artificial Sequence
  oligonucleotide - internucleotide bonds are phosphorothioate bonds (PS)
  modified_base (1)..(2): LNA nucleoside
  modified_base (11)..(14): LNA nucleoside
tagggtcaatctga

SEQ ID NO: 2781 - DNA, 14 bp, Artificial Sequence
  oligonucleotide - internucleotide bonds are phosphorothioate bonds (PS)
  modified_base (1)..(3): LNA nucleoside
  modified_base (11)..(14): LNA nucleoside
tagggtcaatctga

SEQ ID NO: 2782 - DNA, 14 bp, Artificial Sequence
  oligonucleotide - internucleotide bonds are phosphorothioate bonds (PS)
  modified_base (1)..(4): LNA nucleoside
  modified_base (11)..(14): LNA nucleoside
tagggtcaatctga

SEQ ID NO: 2783 - DNA, 16 bp, Artificial Sequence
  oligonucleotide - internucleotide bonds are phosphorothioate bonds (PS)
  modified_base (1)..(2): LNA nucleoside
  modified_base (15)..(16): LNA nucleoside
tgtgtgtgggtgtgga

SEQ ID NO: 2784 - DNA, 16 bp, Artificial Sequence
  oligonucleotide - internucleotide bonds are phosphorothioate bonds (PS)
  modified_base (1)..(2): LNA nucleoside
  modified_base (14)..(16): LNA nucleoside
tgtgtgtgggtgtgga

SEQ ID NO: 2785 - DNA, 16 bp, Artificial Sequence
  oligonucleotide - internucleotide bonds are phosphorothioate bonds (PS)
  modified_base (1)..(3): LNA nucleoside
  modified_base (15)..(16): LNA nucleoside
tgtgtgtgggtgtgga

SEQ ID NO: 2786 - DNA, 17 bp, Artificial Sequence
  oligonucleotide - internucleotide bonds are phosphorothioate bonds (PS)
  modified_base (1)..(2): LNA nucleoside
  modified_base (16)..(17): LNA nucleoside
gtgtgtgtgggtgtgga

SEQ ID NO: 2787 - DNA, 17 bp, Artificial Sequence
  oligonucleotide - internucleotide bonds are phosphorothioate bonds (PS)
  modified_base (1)..(3): LNA nucleoside
  modified_base (16)..(17): LNA nucleoside
gtgtgtgtgggtgtgga

SEQ ID NO: 2788 - DNA, 17 bp, Artificial Sequence
  oligonucleotide - internucleotide bonds are phosphorothioate bonds (PS)
  modified_base (1)..(2): LNA nucleoside
  modified_base (15)..(17): LNA nucleoside
gtgtgtgtgggtgtgga

SEQ ID NO: 2789 - DNA, 18 bp, Artificial Sequence
  oligonucleotide - internucleotide bonds are phosphorothioate bonds (PS)
  modified_base (1)..(2): LNA nucleoside
  modified_base (17)..(18): LNA nucleoside
ggtgtgtgtgggtgtgga

SEQ ID NO: 2790 - DNA, 18 bp, Artificial Sequence
  oligonucleotide - internucleotide bonds are phosphorothioate bonds (PS)
  modified_base (1)..(2): LNA nucleoside
  modified_base (16)..(18): LNA nucleoside
ggtgtgtgtgggtgtgga

SEQ ID NO: 2791 - DNA, 18 bp, Artificial Sequence
  oligonucleotide - internucleotide bonds are phosphorothioate bonds (PS)
  modified_base (1)..(3): LNA nucleoside
  modified_base (17)..(18): LNA nucleoside
ggtgtgtgtgggtgtgga

SEQ ID NO: 2792 - DNA, 14 bp, Artificial Sequence
  oligonucleotide - internucleotide bonds are phosphorothioate bonds (PS)
  modified_base (1)..(2): LNA nucleoside
  modified_base (13)..(14): LNA nucleoside
gttcctggtaggga

SEQ ID NO: 2793 - DNA, 14 bp, Artificial Sequence
  oligonucleotide - internucleotide bonds are phosphorothioate bonds (PS)
  modified_base (1)..(2): LNA nucleoside
  modified_base (12)..(14): LNA nucleoside
gttcctggtaggga

SEQ ID NO: 2794 - DNA, 14 bp, Artificial Sequence
  oligonucleotide - internucleotide bonds are phosphorothioate bonds (PS)
  modified_base (1)..(4): LNA nucleoside
  modified_base (12)..(14): LNA nucleoside
gttcctggtaggga

SEQ ID NO: 2795 - DNA, 15 bp, Artificial Sequence
  oligonucleotide - internucleotide bonds are phosphorothioate bonds (PS)
  modified_base (1)..(2): LNA nucleoside
  modified_base (14)..(15): LNA nucleoside
agggcagggtcagga

SEQ ID NO: 2796 - DNA, 15 bp, Artificial Sequence
  oligonucleotide - internucleotide bonds are phosphorothioate bonds (PS)
  modified_base (1)..(2): LNA nucleoside
  modified_base (13)..(15): LNA nucleoside
agggcagggtcagga

SEQ ID NO: 2797 - DNA, 15 bp, Artificial Sequence
  oligonucleotide - internucleotide bonds are phosphorothioate bonds (PS)
  modified_base (1)..(3): LNA nucleoside
  modified_base (14)..(15): LNA nucleoside
agggcagggtcagga

SEQ ID NO: 2798 - DNA, 14 bp, Artificial Sequence
  oligonucleotide - internucleotide bonds are phosphorothioate bonds (PS)
  modified_base (1)..(2): LNA nucleoside
  modified_base (13)..(14): LNA nucleoside
ggctgctaccagga

SEQ ID NO: 2799 - DNA, 14 bp, Artificial Sequence
  oligonucleotide - internucleotide bonds are phosphorothioate bonds (PS)
  modified_base (1)..(2): LNA nucleoside
  modified_base (12)..(14): LNA nucleoside
ggctgctaccagga

SEQ ID NO: 2800 - DNA, 14 bp, Artificial Sequence
  oligonucleotide - internucleotide bonds are phosphorothioate bonds (PS)
  modified_base (1)..(3): LNA nucleoside
  modified_base (13)..(14): LNA nucleoside
ggctgctaccagga

SEQ ID NO: 2801 - DNA, 15 bp, Artificial Sequence
  oligonucleotide - internucleotide bonds are phosphorothioate bonds (PS)
  modified_base (1)..(2): LNA nucleoside
  modified_base (14)..(15): LNA nucleoside
aggctgctaccagga

SEQ ID NO: 2802 - DNA, 15 bp, Artificial Sequence
  oligonucleotide - internucleotide bonds are phosphorothioate bonds (PS)
  modified_base (1)..(3): LNA nucleoside
  modified_base (14)..(15): LNA nucleoside
aggctgctaccagga

SEQ ID NO: 2803 - DNA, 15 bp, Artificial Sequence
  oligonucleotide - internucleotide bonds are phosphorothioate bonds (PS)
  modified_base (1)..(2): LNA nucleoside
  modified_base (13)..(15): LNA nucleoside
aggctgctaccagga

SEQ ID NO: 2804 - DNA, 15 bp, Artificial Sequence
  oligonucleotide - internucleotide bonds are phosphorothioate bonds (PS)
  modified_base (1)..(2): LNA nucleoside
  modified_base (13)..(15): LNA nucleoside
tagaagagaccagga

SEQ ID NO: 2805 - DNA, 15 bp, Artificial Sequence
  oligonucleotide - internucleotide bonds are phosphorothioate bonds (PS)
  modified_base (1)..(3): LNA nucleoside
  modified_base (12)..(15): LNA nucleoside
tagaagagaccagga

SEQ ID NO: 2806 - DNA, 15 bp, Artificial Sequence
  oligonucleotide - internucleotide bonds are phosphorothioate bonds (PS)
  modified_base (1)..(4): LNA nucleoside
  modified_base (12)..(15): LNA nucleoside
tagaagagaccagga

SEQ ID NO: 2807 - DNA, 14 bp, Artificial Sequence
  oligonucleotide - internucleotide bonds are phosphorothioate bonds (PS)
  modified_base (1)..(2): LNA nucleoside
  modified_base (11)..(14): LNA nucleoside
tggaggtgattaga

SEQ ID NO: 2808 - DNA, 14 bp, Artificial Sequence
  oligonucleotide - internucleotide bonds are phosphorothioate bonds (PS)
  modified_base (1)..(4): LNA nucleoside
  modified_base (12)..(14): LNA nucleoside
tggaggtgattaga

SEQ ID NO: 2809 - DNA, 14 bp, Artificial Sequence
  oligonucleotide - internucleotide bonds are phosphorothioate bonds (PS)
  modified_base (1)..(4): LNA nucleoside
  modified_base (11)..(14): LNA nucleoside
tggaggtgattaga

SEQ ID NO: 2810 - DNA, 14 bp, Artificial Sequence
  oligonucleotide - internucleotide bonds are phosphorothioate bonds (PS)
  modified_base (1)..(3): LNA nucleoside
  modified_base (12)..(14): LNA nucleoside
atcctacaggtaga

SEQ ID NO: 2811 - DNA, 14 bp, Artificial Sequence
  oligonucleotide - internucleotide bonds are phosphorothioate bonds (PS)
  modified_base (1)..(3): LNA nucleoside
  modified_base (11)..(14): LNA nucleoside
atcctacaggtaga

SEQ ID NO: 2812 - DNA, 14 bp, Artificial Sequence
  oligonucleotide - internucleotide bonds are phosphorothioate bonds (PS)
  modified_base (1)..(4): LNA nucleoside
  modified_base (11)..(14): LNA nucleoside
atcctacaggtaga

SEQ ID NO: 2813 - DNA, 14 bp, Artificial Sequence
  oligonucleotide - internucleotide bonds are phosphorothioate bonds (PS)
  modified_base (1)..(2): LNA nucleoside
  modified_base (11)..(14): LNA nucleoside
catccaacttgaga

SEQ ID NO: 2814 - DNA, 14 bp, Artificial Sequence
  oligonucleotide - internucleotide bonds are phosphorothioate bonds (PS)
  modified_base (1)..(4): LNA nucleoside
  modified_base (12)..(14): LNA nucleoside
catccaacttgaga

SEQ ID NO: 2815 - DNA, 14 bp, Artificial Sequence
  oligonucleotide - internucleotide bonds are phosphorothioate bonds (PS)
  modified_base (1)..(4): LNA nucleoside
  modified_base (11)..(14): LNA nucleoside
catccaacttgaga

SEQ ID NO: 2816 - DNA, 14 bp, Artificial Sequence
  oligonucleotide - internucleotide bonds are phosphorothioate bonds (PS)
  modified_base (1)..(2): LNA nucleoside
  modified_base (11)..(14): LNA nucleoside
ggactgaagtgaga

SEQ ID NO: 2817 - DNA, 14 bp, Artificial Sequence
  oligonucleotide - internucleotide bonds are phosphorothioate bonds (PS)
  modified_base (1)..(3): LNA nucleoside
  modified_base (11)..(14): LNA nucleoside
ggactgaagtgaga

SEQ ID NO: 2818 - DNA, 14 bp, Artificial Sequence
  oligonucleotide - internucleotide bonds are phosphorothioate bonds (PS)
  modified_base (1)..(4): LNA nucleoside
  modified_base (11)..(14): LNA nucleoside
ggactgaagtgaga

SEQ ID NO: 2819 - DNA, 14 bp, Artificial Sequence
  oligonucleotide - internucleotide bonds are phosphorothioate bonds (PS)
  modified_base (1)..(3): LNA nucleoside
  modified_base (13)..(14): LNA nucleoside
gcgactgatggaga

SEQ ID NO: 2820 - DNA, 14 bp, Artificial Sequence
  oligonucleotide - internucleotide bonds are phosphorothioate bonds (PS)
  modified_base (1)..(4): LNA nucleoside
  modified_base (13)..(14): LNA nucleoside
gcgactgatggaga

SEQ ID NO: 2821 - DNA, 14 bp, Artificial Sequence
  oligonucleotide - internucleotide bonds are phosphorothioate bonds (PS)
  modified_base (1)..(3): LNA nucleoside
  modified_base (11)..(14): LNA nucleoside
gcgactgatggaga

SEQ ID NO: 2822 - DNA, 15 bp, Artificial Sequence
  oligonucleotide - internucleotide bonds are phosphorothioate bonds (PS)
  modified_base (1)..(2): LNA nucleoside
  modified_base (14)..(15): LNA nucleoside
gggccagacaggaga

SEQ ID NO: 2823 - DNA, 15 bp, Artificial Sequence
  oligonucleotide - internucleotide bonds are phosphorothioate bonds (PS)
  modified_base (1)..(3): LNA nucleoside
  modified_base (14)..(15): LNA nucleoside
gggccagacaggaga

SEQ ID NO: 2824 - DNA, 15 bp, Artificial Sequence
  oligonucleotide - internucleotide bonds are phosphorothioate bonds (PS)
  modified_base (1)..(2): LNA nucleoside
  modified_base (13)..(15): LNA nucleoside
gggccagacaggaga

SEQ ID NO: 2825 - DNA, 16 bp, Artificial Sequence
  oligonucleotide - internucleotide bonds are phosphorothioate bonds (PS)
  modified_base (1)..(2): LNA nucleoside
  modified_base (15)..(16): LNA nucleoside
agggccagacaggaga

SEQ ID NO: 2826 - DNA, 16 bp, Artificial Sequence
  oligonucleotide - internucleotide bonds are phosphorothioate bonds (PS)
  modified_base (1)..(2): LNA nucleoside
  modified_base (14)..(16): LNA nucleoside
agggccagacaggaga

SEQ ID NO: 2827 - DNA, 16 bp, Artificial Sequence
  oligonucleotide - internucleotide bonds are phosphorothioate bonds (PS)
  modified_base (1)..(3): LNA nucleoside
  modified_base (15)..(16): LNA nucleoside
agggccagacaggaga

SEQ ID NO: 2828 - DNA, 15 bp, Artificial Sequence
  oligonucleotide - internucleotide bonds are phosphorothioate bonds (PS)
  modified_base (1)..(4): LNA nucleoside
  modified_base (13)..(15): LNA nucleoside
ctaaagaatagaaga

SEQ ID NO: 2829 - DNA, 15 bp, Artificial Sequence
  oligonucleotide - internucleotide bonds are phosphorothioate bonds (PS)
  modified_base (1)..(3): LNA nucleoside
  modified_base (12)..(15): LNA nucleoside
ctaaagaatagaaga

SEQ ID NO: 2830 - DNA, 15 bp, Artificial Sequence
  oligonucleotide - internucleotide bonds are phosphorothioate bonds (PS)
  modified_base (1)..(4): LNA nucleoside
  modified_base (12)..(15): LNA nucleoside
ctaaagaatagaaga

SEQ ID NO: 2831 - DNA, 16 bp, Artificial Sequence
  oligonucleotide - internucleotide bonds are phosphorothioate bonds (PS)
  modified_base (1)..(3): LNA nucleoside
  modified_base (13)..(16): LNA nucleoside
tagtttctgaaaaaga

SEQ ID NO: 2832 - DNA, 16 bp, Artificial Sequence
  oligonucleotide - internucleotide bonds are phosphorothioate bonds (PS)
  modified_base (1)..(4): LNA nucleoside
  modified_base (14)..(16): LNA nucleoside
tagtttctgaaaaaga

SEQ ID NO: 2833 - DNA, 16 bp, Artificial Sequence
  oligonucleotide - internucleotide bonds are phosphorothioate bonds (PS)
  modified_base (1)..(4): LNA nucleoside
  modified_base (13)..(16): LNA nucleoside
tagtttctgaaaaaga

SEQ ID NO: 2834 - DNA, 15 bp, Artificial Sequence
  oligonucleotide - internucleotide bonds are phosphorothioate bonds (PS)
  modified_base (1)..(2): LNA nucleoside
  modified_base (14)..(15): LNA nucleoside
tgtctgtgtgcttca

SEQ ID NO: 2835 - DNA, 15 bp, Artificial Sequence
  oligonucleotide - internucleotide bonds are phosphorothioate bonds (PS)
  modified_base (1)..(2): LNA nucleoside
  modified_base (12)..(15): LNA nucleoside
tgtctgtgtgcttca

SEQ ID NO: 2836 - DNA, 15 bp, Artificial Sequence
  oligonucleotide - internucleotide bonds are phosphorothioate bonds (PS)
  modified_base (1)..(4): LNA nucleoside
  modified_base (13)..(15): LNA nucleoside
tgtctgtgtgcttca

SEQ ID NO: 2837 - DNA, 15 bp, Artificial Sequence
  oligonucleotide - internucleotide bonds are phosphorothioate bonds (PS)
  modified_base (1)..(3): LNA nucleoside
  modified_base (14)..(15): LNA nucleoside
ccacaggaatattca

SEQ ID NO: 2838 - DNA, 15 bp, Artificial Sequence
  oligonucleotide - internucleotide bonds are phosphorothioate bonds (PS)
  modified_base (1)..(4): LNA nucleoside
  modified_base (14)..(15): LNA nucleoside
ccacaggaatattca

SEQ ID NO: 2839 - DNA, 15 bp, Artificial Sequence
  oligonucleotide - internucleotide bonds are phosphorothioate bonds (PS)
  modified_base (1)..(4): LNA nucleoside
  modified_base (12)..(15): LNA nucleoside
ccacaggaatattca

SEQ ID NO: 2840 - DNA, 15 bp, Artificial Sequence
  oligonucleotide - internucleotide bonds are phosphorothioate bonds (PS)
  modified_base (1)..(2): LNA nucleoside
  modified_base (14)..(15): LNA nucleoside
tggagcaggcattca

SEQ ID NO: 2841 - DNA, 15 bp, Artificial Sequence
  oligonucleotide - internucleotide bonds are phosphorothioate bonds (PS)
  modified_base (1)..(2): LNA nucleoside
  modified_base (12)..(15): LNA nucleoside
tggagcaggcattca

SEQ ID NO: 2842 - DNA, 15 bp, Artificial Sequence
  oligonucleotide - internucleotide bonds are phosphorothioate bonds (PS)
  modified_base (1)..(4): LNA nucleoside
  modified_base (14)..(15): LNA nucleoside
tggagcaggcattca

SEQ ID NO: 2843 - DNA, 15 bp, Artificial Sequence
  oligonucleotide - internucleotide bonds are phosphorothioate bonds (PS)
  modified_base (1)..(2): LNA nucleoside
  modified_base (14)..(15): LNA nucleoside
tctcaccctgagtca

SEQ ID NO: 2844 - DNA, 15 bp, Artificial Sequence
  oligonucleotide - internucleotide bonds are phosphorothioate bonds (PS)
  modified_base (1)..(2): LNA nucleoside
  modified_base (13)..(15): LNA nucleoside
tctcaccctgagtca

SEQ ID NO: 2845 - DNA, 15 bp, Artificial Sequence
  oligonucleotide - internucleotide bonds are phosphorothioate bonds (PS)
  modified_base (1)..(2): LNA nucleoside
  modified_base (12)..(15): LNA nucleoside
tctcaccctgagtca

SEQ ID NO: 2846 - DNA, 18 bp, Artificial Sequence
  oligonucleotide - internucleotide bonds are phosphorothioate bonds (PS)
  modified_base (1)..(2): LNA nucleoside
  modified_base (17)..(18): LNA nucleoside
gatgaggaaacagactca

SEQ ID NO: 2847 - DNA, 18 bp, Artificial Sequence
  oligonucleotide - internucleotide bonds are phosphorothioate bonds (PS)
  modified_base (1)..(2): LNA nucleoside
  modified_base (15)..(18): LNA nucleoside
gatgaggaaacagactca

SEQ ID NO: 2848 - DNA, 18 bp, Artificial Sequence
  oligonucleotide - internucleotide bonds are phosphorothioate bonds (PS)
  modified_base (1)..(4): LNA nucleoside
  modified_base (15)..(18): LNA nucleoside
gatgaggaaacagactca

SEQ ID NO: 2849 - DNA, 19 bp, Artificial Sequence
  oligonucleotide - internucleotide bonds are phosphorothioate bonds (PS)
  modified_base (1)..(2): LNA nucleoside
  modified_base (18)..(19): LNA nucleoside
agatgaggaaacagactca

SEQ ID NO: 2850 - DNA, 19 bp, Artificial Sequence
  oligonucleotide - internucleotide bonds are phosphorothioate bonds (PS)
  modified_base (1)..(2): LNA nucleoside
  modified_base (16)..(19): LNA nucleoside
agatgaggaaacagactca

SEQ ID NO: 2851 - DNA, 19 bp, Artificial Sequence
  oligonucleotide - internucleotide bonds are phosphorothioate bonds (PS)
  modified_base (1)..(4): LNA nucleoside
  modified_base (17)..(19): LNA nucleoside
agatgaggaaacagactca

SEQ ID NO: 2852 - DNA, 15 bp, Artificial Sequence
  oligonucleotide - internucleotide bonds are phosphorothioate bonds (PS)
  modified_base (1)..(3): LNA nucleoside
  modified_base (13)..(15): LNA nucleoside
aagcaaatgtctgca

SEQ ID NO: 2853 - DNA, 15 bp, Artificial Sequence
  oligonucleotide - internucleotide bonds are phosphorothioate bonds (PS)
  modified_base (1)..(3): LNA nucleoside
  modified_base (12)..(15): LNA nucleoside
aagcaaatgtctgca

SEQ ID NO: 2854 - DNA, 15 bp, Artificial Sequence
  oligonucleotide - internucleotide bonds are phosphorothioate bonds (PS)
  modified_base (1)..(4): LNA nucleoside
  modified_base (12)..(15): LNA nucleoside
aagcaaatgtctgca

SEQ ID NO: 2855 - DNA, 14 bp, Artificial Sequence
  oligonucleotide - internucleotide bonds are phosphorothioate bonds (PS)
  modified_base (1)..(2): LNA nucleoside
  modified_base (13)..(14): LNA nucleoside
ggctggtgttggca

SEQ ID NO: 2856 - DNA, 14 bp, Artificial Sequence
  oligonucleotide - internucleotide bonds are phosphorothioate bonds (PS)
  modified_base (1)..(2): LNA nucleoside
  modified_base (12)..(14): LNA nucleoside
ggctggtgttggca

SEQ ID NO: 2857 - DNA, 14 bp, Artificial Sequence
  oligonucleotide - internucleotide bonds are phosphorothioate bonds (PS)
  modified_base (1)..(3): LNA nucleoside
  modified_base (13)..(14): LNA nucleoside
ggctggtgttggca

SEQ ID NO: 2858 - DNA, 15 bp, Artificial Sequence
  oligonucleotide - internucleotide bonds are phosphorothioate bonds (PS)
  modified_base (1)..(2): LNA nucleoside
  modified_base (14)..(15): LNA nucleoside
tggctggtgttggca

SEQ ID NO: 2859 - DNA, 15 bp, Artificial Sequence
  oligonucleotide - internucleotide bonds are phosphorothioate bonds (PS)
  modified_base (1)..(3): LNA nucleoside
  modified_base (14)..(15): LNA nucleoside
tggctggtgttggca

SEQ ID NO: 2860 - DNA, 15 bp, Artificial Sequence
  oligonucleotide - internucleotide bonds are phosphorothioate bonds (PS)
  modified_base (1)..(2): LNA nucleoside
  modified_base (13)..(15): LNA nucleoside
tggctggtgttggca

SEQ ID NO: 2861 - DNA, 16 bp, Artificial Sequence
  oligonucleotide - internucleotide bonds are phosphorothioate bonds (PS)
  modified_base (1)..(2): LNA nucleoside
  modified_base (15)..(16): LNA nucleoside
gtggctggtgttggca

SEQ ID NO: 2862 - DNA, 16 bp, Artificial Sequence
  oligonucleotide - internucleotide bonds are phosphorothioate bonds (PS)
  modified_base (1)..(3): LNA nucleoside
  modified_base (15)..(16): LNA nucleoside
gtggctggtgttggca

SEQ ID NO: 2863 - DNA, 16 bp, Artificial Sequence
  oligonucleotide - internucleotide bonds are phosphorothioate bonds (PS)
  modified_base (1)..(2): LNA nucleoside
  modified_base (14)..(16): LNA nucleoside
gtggctggtgttggca

SEQ ID NO: 2864 - DNA, 15 bp, Artificial Sequence
  oligonucleotide - internucleotide bonds are phosphorothioate bonds (PS)
  modified_base (1)..(3): LNA nucleoside
  modified_base (14)..(15): LNA nucleoside
taggataatgcagca

SEQ ID NO: 2865 - DNA, 15 bp, Artificial Sequence
  oligonucleotide - internucleotide bonds are phosphorothioate bonds (PS)
  modified_base (1)..(3): LNA nucleoside
  modified_base (13)..(15): LNA nucleoside
taggataatgcagca

SEQ ID NO: 2866 - DNA, 15 bp, Artificial Sequence
  oligonucleotide - internucleotide bonds are phosphorothioate bonds (PS)
  modified_base (1)..(4): LNA nucleoside
  modified_base (12)..(15): LNA nucleoside
taggataatgcagca

SEQ ID NO: 2867 - DNA, 16 bp, Artificial Sequence
  oligonucleotide - internucleotide bonds are phosphorothioate bonds (PS)
  modified_base (1)..(3): LNA nucleoside
  modified_base (15)..(16): LNA nucleoside
ataggataatgcagca

SEQ ID NO: 2868 - DNA, 16 bp, Artificial Sequence
  oligonucleotide - internucleotide bonds are phosphorothioate bonds (PS)
  modified_base (1)..(3): LNA nucleoside
  modified_base (14)..(16): LNA nucleoside
ataggataatgcagca

SEQ ID NO: 2869 - DNA, 16 bp, Artificial Sequence
  oligonucleotide - internucleotide bonds are phosphorothioate bonds (PS)
  modified_base (1)..(4): LNA nucleoside
  modified_base (13)..(16): LNA nucleoside
ataggataatgcagca

SEQ ID NO: 2870 - DNA, 15 bp, Artificial Sequence
  oligonucleotide - internucleotide bonds are phosphorothioate bonds (PS)
  modified_base (1)..(2): LNA nucleoside
  modified_base (14)..(15): LNA nucleoside
aatgtgggcccagca

SEQ ID NO: 2871 - DNA, 15 bp, Artificial Sequence
  oligonucleotide - internucleotide bonds are phosphorothioate bonds (PS)
  modified_base (1)..(3): LNA nucleoside
  modified_base (14)..(15): LNA nucleoside
aatgtgggcccagca

SEQ ID NO: 2872 - DNA, 15 bp, Artificial Sequence
  oligonucleotide - internucleotide bonds are phosphorothioate bonds (PS)
  modified_base (1)..(2): LNA nucleoside
  modified_base (13)..(15): LNA nucleoside
aatgtgggcccagca

SEQ ID NO: 2873 - DNA, 15 bp, Artificial Sequence
  oligonucleotide - internucleotide bonds are phosphorothioate bonds (PS)
  modified_base (1)..(2): LNA nucleoside
  modified_base (14)..(15): LNA nucleoside
ctgaggctcagtcca

SEQ ID NO: 2874 - DNA, 15 bp, Artificial Sequence
  oligonucleotide - internucleotide bonds are phosphorothioate bonds (PS)
  modified_base (1)..(3): LNA nucleoside
  modified_base (14)..(15): LNA nucleoside
ctgaggctcagtcca

SEQ ID NO: 2875 - DNA, 15 bp, Artificial Sequence
  oligonucleotide - internucleotide bonds are phosphorothioate bonds (PS)
  modified_base (1)..(2): LNA nucleoside
  modified_base (13)..(15): LNA nucleoside
ctgaggctcagtcca

SEQ ID NO: 2876 - DNA, 15 bp, Artificial Sequence
  oligonucleotide - internucleotide bonds are phosphorothioate bonds (PS)
  modified_base (1)..(2): LNA nucleoside
  modified_base (14)..(15): LNA nucleoside
cccattttcatgcca

SEQ ID NO: 2877 - DNA, 15 bp, Artificial Sequence
  oligonucleotide - internucleotide bonds are phosphorothioate bonds (PS)
  modified_base (1)..(3): LNA nucleoside
  modified_base (14)..(15): LNA nucleoside
cccattttcatgcca

SEQ ID NO: 2878 - DNA, 15 bp, Artificial Sequence
  oligonucleotide - internucleotide bonds are phosphorothioate bonds (PS)
  modified_base (1)..(2): LNA nucleoside
  modified_base (13)..(15): LNA nucleoside
cccattttcatgcca

SEQ ID NO: 2879 - DNA, 16 bp, Artificial Sequence
  oligonucleotide - internucleotide bonds are phosphorothioate bonds (PS)
  modified_base (1)..(2): LNA nucleoside
  modified_base (15)..(16): LNA nucleoside
gcccattttcatgcca

SEQ ID NO: 2880 - DNA, 16 bp, Artificial Sequence
  oligonucleotide - internucleotide bonds are phosphorothioate bonds (PS)
  modified_base (1)..(3): LNA nucleoside
  modified_base (15)..(16): LNA nucleoside
gcccattttcatgcca

SEQ ID NO: 2881 - DNA, 16 bp, Artificial Sequence
  oligonucleotide - internucleotide bonds are phosphorothioate bonds (PS)
  modified_base (1)..(2): LNA nucleoside
  modified_base (14)..(16): LNA nucleoside
gcccattttcatgcca

SEQ ID NO: 2882 - DNA, 15 bp, Artificial Sequence
  oligonucleotide - internucleotide bonds are phosphorothioate bonds (PS)
  modified_base (1)..(2): LNA nucleoside
  modified_base (14)..(15): LNA nucleoside
ctctgctacttccca

SEQ ID NO: 2883 - DNA, 15 bp, Artificial Sequence
  oligonucleotide - internucleotide bonds are phosphorothioate bonds (PS)
  modified_base (1)..(3): LNA nucleoside
  modified_base (14)..(15): LNA nucleoside
ctctgctacttccca

SEQ ID NO: 2884 - DNA, 15 bp, Artificial Sequence
  oligonucleotide - internucleotide bonds are phosphorothioate bonds (PS)
  modified_base (1)..(2): LNA nucleoside
  modified_base (13)..(15): LNA nucleoside
ctctgctacttccca

SEQ ID NO: 2885 - DNA, 16 bp, Artificial Sequence
  oligonucleotide - internucleotide bonds are phosphorothioate bonds (PS)
  modified_base (1)..(2): LNA nucleoside
  modified_base (15)..(16): LNA nucleoside
cctctgctacttccca

SEQ ID NO: 2886 - DNA, 16 bp, Artificial Sequence
  oligonucleotide - internucleotide bonds are phosphorothioate bonds (PS)
  modified_base (1)..(3): LNA nucleoside
  modified_base (15)..(16): LNA nucleoside
cctctgctacttccca

SEQ ID NO: 2887 - DNA, 16 bp, Artificial Sequence
  oligonucleotide - internucleotide bonds are phosphorothioate bonds (PS)
  modified_base (1)..(2): LNA nucleoside
  modified_base (14)..(16): LNA nucleoside
cctctgctacttccca

SEQ ID NO: 2888 - DNA, 14 bp, Artificial Sequence
  oligonucleotide - internucleotide bonds are phosphorothioate bonds (PS)
  modified_base (1)..(2): LNA nucleoside
  modified_base (13)..(14): LNA nucleoside
  modified_base (9)..(9): 5-methyl cytosine
cagcaggccgccca

SEQ ID NO: 2889 - DNA, 14 bp, Artificial Sequence
  oligonucleotide - internucleotide bonds are phosphorothioate bonds (PS)
  modified_base (1)..(3): LNA nucleoside
  modified_base (13)..(14): LNA nucleoside
  modified_base (9)..(9): 5-methyl cytosine
cagcaggccgccca

SEQ ID NO: 2890 - DNA, 14 bp, Artificial Sequence
  oligonucleotide - internucleotide bonds are phosphorothioate bonds (PS)
  modified_base (1)..(2): LNA nucleoside
  modified_base (12)..(14): LNA nucleoside
  modified_base (9)..(9): 5-methyl cytosine
cagcaggccgccca

SEQ ID NO: 2891 - DNA, 15 bp, Artificial Sequence
  oligonucleotide - internucleotide bonds are phosphorothioate bonds (PS)
  modified_base (1)..(2): LNA nucleoside
  modified_base (14)..(15): LNA nucleoside
  modified_base (10)..(10): 5-methyl cytosine
ccagcaggccgccca

SEQ ID NO: 2892 - DNA, 15 bp, Artificial Sequence
  oligonucleotide - internucleotide bonds are phosphorothioate bonds (PS)
  modified_base (1)..(3): LNA nucleoside
  modified_base (14)..(15): LNA nucleoside
  modified_base (10)..(10): 5-methyl cytosine
ccagcaggccgccca

SEQ ID NO: 2893 - DNA, 15 bp, Artificial Sequence
  oligonucleotide - internucleotide bonds are phosphorothioate bonds (PS)
  modified_base (1)..(2): LNA nucleoside
  modified_base (13)..(15): LNA nucleoside
  modified_base (10)..(10): 5-methyl cytosine
ccagcaggccgccca

SEQ ID NO: 2894 - DNA, 14 bp, Artificial Sequence
  oligonucleotide - internucleotide bonds are phosphorothioate bonds (PS)
  modified_base (1)..(3): LNA nucleoside
  modified_base (13)..(14): LNA nucleoside
gttatgtaacccca

SEQ ID NO: 2895 - DNA, 14 bp, Artificial Sequence
  oligonucleotide - internucleotide bonds are phosphorothioate bonds (PS)
  modified_base (1)..(3): LNA nucleoside
  modified_base (12)..(14): LNA nucleoside
gttatgtaacccca

SEQ ID NO: 2896 - DNA, 14 bp, Artificial Sequence
  oligonucleotide - internucleotide bonds are phosphorothioate bonds (PS)
  modified_base (1)..(3): LNA nucleoside
  modified_base (11)..(14): LNA nucleoside
gttatgtaacccca

SEQ ID NO: 2897 - DNA, 15 bp, Artificial Sequence
  oligonucleotide - internucleotide bonds are phosphorothioate bonds (PS)
  modified_base (1)..(2): LNA nucleoside
  modified_base (14)..(15): LNA nucleoside
agttatgtaacccca

SEQ ID NO: 2898 - DNA, 15 bp, Artificial Sequence
  oligonucleotide - internucleotide bonds are phosphorothioate bonds (PS)
  modified_base (1)..(4): LNA nucleoside
  modified_base (14)..(15): LNA nucleoside
agttatgtaacccca

SEQ ID NO: 2899 - DNA, 15 bp, Artificial Sequence
  oligonucleotide - internucleotide bonds are phosphorothioate bonds (PS)
  modified_base (1)..(4): LNA nucleoside
  modified_base (13)..(15): LNA nucleoside
agttatgtaacccca

SEQ ID NO: 2900 - DNA, 16 bp, Artificial Sequence
  oligonucleotide - internucleotide bonds are phosphorothioate bonds (PS)
  modified_base (1)..(2): LNA nucleoside
  modified_base (15)..(16): LNA nucleoside
cagttatgtaacccca

SEQ ID NO: 2901 - DNA, 16 bp, Artificial Sequence
  oligonucleotide - internucleotide bonds are phosphorothioate bonds (PS)
  modified_base (1)..(3): LNA nucleoside
  modified_base (15)..(16): LNA nucleoside
cagttatgtaacccca

SEQ ID NO: 2902 - DNA, 16 bp, Artificial Sequence
  oligonucleotide - internucleotide bonds are phosphorothioate bonds (PS)
  modified_base (1)..(4): LNA nucleoside
  modified_base (15)..(16): LNA nucleoside
cagttatgtaacccca

SEQ ID NO: 2903 - DNA, 15 bp, Artificial Sequence
  oligonucleotide - internucleotide bonds are phosphorothioate bonds (PS)
  modified_base (1)..(2): LNA nucleoside
  modified_base (14)..(15): LNA nucleoside
tattcccaccaccca

SEQ ID NO: 2904 - DNA, 15 bp, Artificial Sequence
  oligonucleotide - internucleotide bonds are phosphorothioate bonds (PS)
  modified_base (1)..(3): LNA nucleoside
  modified_base (14)..(15): LNA nucleoside
tattcccaccaccca

SEQ ID NO: 2905 - DNA, 15 bp, Artificial Sequence
  oligonucleotide - internucleotide bonds are phosphorothioate bonds (PS)
  modified_base (1)..(4): LNA nucleoside
  modified_base (14)..(15): LNA nucleoside
tattcccaccaccca

SEQ ID NO: 2906 - DNA, 15 bp, Artificial Sequence
  oligonucleotide - internucleotide bonds are phosphorothioate bonds (PS)
  modified_base (1)..(2): LNA nucleoside
  modified_base (12)..(15): LNA nucleoside
aaaaagaggaaccca

SEQ ID NO: 2907 - DNA, 15 bp, Artificial Sequence
  oligonucleotide - internucleotide bonds are phosphorothioate bonds (PS)
  modified_base (1)..(3): LNA nucleoside
  modified_base (12)..(15): LNA nucleoside
aaaaagaggaaccca

SEQ ID NO: 2908 - DNA, 15 bp, Artificial Sequence
  oligonucleotide - internucleotide bonds are phosphorothioate bonds (PS)
  modified_base (1)..(4): LNA nucleoside
  modified_base (12)..(15): LNA nucleoside
aaaaagaggaaccca

SEQ ID NO: 2909 - DNA, 16 bp, Artificial Sequence
  oligonucleotide - internucleotide bonds are phosphorothioate bonds (PS)
  modified_base (1)..(2): LNA nucleoside
  modified_base (13)..(16): LNA nucleoside
taaaaagaggaaccca

SEQ ID NO: 2910 - DNA, 16 bp, Artificial Sequence
  oligonucleotide - internucleotide bonds are phosphorothioate bonds (PS)
  modified_base (1)..(3): LNA nucleoside
  modified_base (13)..(16): LNA nucleoside
taaaaagaggaaccca

SEQ ID NO: 2911 - DNA, 16 bp, Artificial Sequence
  oligonucleotide - internucleotide bonds are phosphorothioate bonds (PS)
  modified_base (1)..(4): LNA nucleoside
  modified_base (13)..(16): LNA nucleoside
taaaaagaggaaccca

SEQ ID NO: 2912 - DNA, 15 bp, Artificial Sequence
  oligonucleotide - internucleotide bonds are phosphorothioate bonds (PS)
  modified_base (1)..(2): LNA nucleoside
  modified_base (12)..(15): LNA nucleoside
aattttccttgtaca

SEQ ID NO: 2913 - DNA, 15 bp, Artificial Sequence
  oligonucleotide - internucleotide bonds are phosphorothioate bonds (PS)
  modified_base (1)..(3): LNA nucleoside
  modified_base (12)..(15): LNA nucleoside
aattttccttgtaca

SEQ ID NO: 2914 - DNA, 15 bp, Artificial Sequence
  oligonucleotide - internucleotide bonds are phosphorothioate bonds (PS)
  modified_base (1)..(4): LNA nucleoside
  modified_base (12)..(15): LNA nucleoside
aattttccttgtaca

SEQ ID NO: 2915 - DNA, 16 bp, Artificial Sequence
  oligonucleotide - internucleotide bonds are phosphorothioate bonds (PS)
  modified_base (1)..(2): LNA nucleoside
  modified_base (13)..(16): LNA nucleoside
taattttccttgtaca

SEQ ID NO: 2916 - DNA, 16 bp, Artificial Sequence
  oligonucleotide - internucleotide bonds are phosphorothioate bonds (PS)
  modified_base (1)..(3): LNA nucleoside
  modified_base (13)..(16): LNA nucleoside
taattttccttgtaca

SEQ ID NO: 2917 - DNA, 16 bp, Artificial Sequence
  oligonucleotide - internucleotide bonds are phosphorothioate bonds (PS)
  modified_base (1)..(4): LNA nucleoside
  modified_base (13)..(16): LNA nucleoside
taattttccttgtaca

SEQ ID NO: 2918 - DNA, 17 bp, Artificial Sequence
  oligonucleotide - internucleotide bonds are phosphorothioate bonds (PS)
  modified_base (1)..(2): LNA nucleoside
  modified_base (15)..(17): LNA nucleoside
ctaattttccttgtaca

SEQ ID NO: 2919 - DNA, 17 bp, Artificial Sequence
  oligonucleotide - internucleotide bonds are phosphorothioate bonds (PS)
  modified_base (1)..(2): LNA nucleoside
  modified_base (14)..(17): LNA nucleoside
ctaattttccttgtaca

SEQ ID NO: 2920 - DNA, 17 bp, Artificial Sequence
  oligonucleotide - internucleotide bonds are phosphorothioate bonds (PS)
  modified_base (1)..(4): LNA nucleoside
  modified_base (14)..(17): LNA nucleoside
ctaattttccttgtaca

SEQ ID NO: 2921 - DNA, 15 bp, Artificial Sequence
  oligonucleotide - internucleotide bonds are phosphorothioate bonds (PS)
  modified_base (1)..(3): LNA nucleoside
  modified_base (13)..(15): LNA nucleoside
atttttctgcctaca

SEQ ID NO: 2922 - DNA, 15 bp, Artificial Sequence
  oligonucleotide - internucleotide bonds are phosphorothioate bonds (PS)
  modified_base (1)..(2): LNA nucleoside
  modified_base (12)..(15): LNA nucleoside
atttttctgcctaca

SEQ ID NO: 2923 - DNA, 15 bp, Artificial Sequence
  oligonucleotide - internucleotide bonds are phosphorothioate bonds (PS)
  modified_base (1)..(4): LNA nucleoside
  modified_base (12)..(15): LNA nucleoside
atttttctgcctaca

SEQ ID NO: 2924 - DNA, 16 bp, Artificial Sequence
  oligonucleotide - internucleotide bonds are phosphorothioate bonds (PS)
  modified_base (1)..(2): LNA nucleoside
  modified_base (14)..(16): LNA nucleoside
tatttttctgcctaca

SEQ ID NO: 2925 - DNA, 16 bp, Artificial Sequence
  oligonucleotide - internucleotide bonds are phosphorothioate bonds (PS)
  modified_base (1)..(2): LNA nucleoside
  modified_base (13)..(16): LNA nucleoside
tatttttctgcctaca

SEQ ID NO: 2926 - DNA, 16 bp, Artificial Sequence
  oligonucleotide - internucleotide bonds are phosphorothioate bonds (PS)
  modified_base (1)..(4): LNA nucleoside
  modified_base (13)..(16): LNA nucleoside
tatttttctgcctaca

SEQ ID NO: 2927 - DNA, 17 bp, Artificial Sequence
  oligonucleotide - internucleotide bonds are phosphorothioate bonds (PS)
  modified_base (1)..(2): LNA nucleoside
  modified_base (16)..(17): LNA nucleoside
ttatttttctgcctaca

SEQ ID NO: 2928 - DNA, 17 bp, Artificial Sequence
  oligonucleotide - internucleotide bonds are phosphorothioate bonds (PS)
  modified_base (1)..(4): LNA nucleoside
  modified_base (16)..(17): LNA nucleoside
ttatttttctgcctaca

SEQ ID NO: 2929 - DNA, 17 bp, Artificial Sequence
  oligonucleotide - internucleotide bonds are phosphorothioate bonds (PS)
  modified_base (1)..(4): LNA nucleoside
  modified_base (14)..(17): LNA nucleoside
ttatttttctgcctaca

SEQ ID NO: 2930 - DNA, 14 bp, Artificial Sequence
  oligonucleotide - internucleotide bonds are phosphorothioate bonds (PS)
  modified_base (1)..(2): LNA nucleoside
  modified_base (13)..(14): LNA nucleoside
gccatagccataca

SEQ ID NO: 2931 - DNA, 14 bp, Artificial Sequence
  oligonucleotide - internucleotide bonds are phosphorothioate bonds (PS)
  modified_base (1)..(3): LNA nucleoside
  modified_base (13)..(14): LNA nucleoside
gccatagccataca

SEQ ID NO: 2932 - DNA, 14 bp, Artificial Sequence
  oligonucleotide - internucleotide bonds are phosphorothioate bonds (PS)
  modified_base (1)..(4): LNA nucleoside
  modified_base (12)..(14): LNA nucleoside
gccatagccataca

SEQ ID NO: 2933 - DNA, 15 bp, Artificial Sequence
  oligonucleotide - internucleotide bonds are phosphorothioate bonds (PS)
  modified_base (1)..(2): LNA nucleoside
  modified_base (14)..(15): LNA nucleoside
agccatagccataca

SEQ ID NO: 2934 - DNA, 15 bp, Artificial Sequence
  oligonucleotide - internucleotide bonds are phosphorothioate bonds (PS)
  modified_base (1)..(2): LNA nucleoside
  modified_base (13)..(15): LNA nucleoside
agccatagccataca

SEQ ID NO: 2935 - DNA, 15 bp, Artificial Sequence
  oligonucleotide - internucleotide bonds are phosphorothioate bonds (PS)
  modified_base (1)..(3): LNA nucleoside
  modified_base (13)..(15): LNA nucleoside
agccatagccataca

SEQ ID NO: 2936 - DNA, 16 bp, Artificial Sequence
  oligonucleotide - internucleotide bonds are phosphorothioate bonds (PS)
  modified_base (1)..(4): LNA nucleoside
  modified_base (15)..(16): LNA nucleoside
tgaacagacagacaca

SEQ ID NO: 2937 - DNA, 16 bp, Artificial Sequence
  oligonucleotide - internucleotide bonds are phosphorothioate bonds (PS)
  modified_base (1)..(3): LNA nucleoside
  modified_base (13)..(16): LNA nucleoside
tgaacagacagacaca

SEQ ID NO: 2938 - DNA, 16 bp, Artificial Sequence
  oligonucleotide - internucleotide bonds are phosphorothioate bonds (PS)
  modified_base (1)..(4): LNA nucleoside
  modified_base (13)..(16): LNA nucleoside
tgaacagacagacaca

SEQ ID NO: 2939 - DNA, 14 bp, Artificial Sequence
  oligonucleotide - internucleotide bonds are phosphorothioate bonds (PS)
  modified_base (1)..(3): LNA nucleoside
  modified_base (11)..(14): LNA nucleoside
gagataggctgtaa

SEQ ID NO: 2940 - DNA, 14 bp, Artificial Sequence
  oligonucleotide - internucleotide bonds are phosphorothioate bonds (PS)
  modified_base (1)..(4): LNA nucleoside
  modified_base (12)..(14): LNA nucleoside
gagataggctgtaa

SEQ ID NO: 2941 - DNA, 14 bp, Artificial Sequence
  oligonucleotide - internucleotide bonds are phosphorothioate bonds (PS)
  modified_base (1)..(4): LNA nucleoside
  modified_base (11)..(14): LNA nucleoside
gagataggctgtaa

SEQ ID NO: 2942 - DNA, 16 bp, Artificial Sequence
  oligonucleotide - internucleotide bonds are phosphorothioate bonds (PS)
  modified_base (1)..(2): LNA nucleoside
  modified_base (14)..(16): LNA nucleoside
ggagagaggtgaggaa

SEQ ID NO: 2943 - DNA, 16 bp, Artificial Sequence
  oligonucleotide - internucleotide bonds are phosphorothioate bonds (PS)
  modified_base (1)..(2): LNA nucleoside
  modified_base (13)..(16): LNA nucleoside
ggagagaggtgaggaa

SEQ ID NO: 2944 - DNA, 16 bp, Artificial Sequence
  oligonucleotide - internucleotide bonds are phosphorothioate bonds (PS)
  modified_base (1)..(3): LNA nucleoside
  modified_base (13)..(16): LNA nucleoside
ggagagaggtgaggaa

SEQ ID NO: 2945 - DNA, 20 bp, Artificial Sequence
  oligonucleotide - internucleotide bonds are phosphorothioate bonds (PS)
  modified_base (1)..(3): LNA nucleoside
  modified_base (18)..(20): LNA nucleoside
atttttaattttctgaggaa

SEQ ID NO: 2946 - DNA, 20 bp, Artificial Sequence
  oligonucleotide - internucleotide bonds are phosphorothioate bonds (PS)
  modified_base (1)..(2): LNA nucleoside
  modified_base (17)..(20): LNA nucleoside
atttttaattttctgaggaa

SEQ ID NO: 2947 - DNA, 20 bp, Artificial Sequence
  oligonucleotide - internucleotide bonds are phosphorothioate bonds (PS)
  modified_base (1)..(4): LNA nucleoside
  modified_base (17)..(20): LNA nucleoside
atttttaattttctgaggaa

SEQ ID NO: 2948 - DNA, 15 bp, Artificial Sequence
  oligonucleotide - internucleotide bonds are phosphorothioate bonds (PS)
  modified_base (1)..(4): LNA nucleoside
  modified_base (13)..(15): LNA nucleoside
ggactgaagtgagaa

SEQ ID NO: 2949 - DNA, 15 bp, Artificial Sequence
  oligonucleotide - internucleotide bonds are phosphorothioate bonds (PS)
  modified_base (1)..(3): LNA nucleoside
  modified_base (12)..(15): LNA nucleoside
ggactgaagtgagaa

SEQ ID NO: 2950 - DNA, 15 bp, Artificial Sequence
  oligonucleotide - internucleotide bonds are phosphorothioate bonds (PS)
  modified_base (1)..(4): LNA nucleoside
  modified_base (12)..(15): LNA nucleoside
ggactgaagtgagaa

SEQ ID NO: 2951 - DNA, 16 bp, Artificial Sequence
  oligonucleotide - internucleotide bonds are phosphorothioate bonds (PS)
  modified_base (1)..(4): LNA nucleoside
  modified_base (14)..(16): LNA nucleoside
ctaaagaatagaagaa

SEQ ID NO: 2952 - DNA, 16 bp, Artificial Sequence
  oligonucleotide - internucleotide bonds are phosphorothioate bonds (PS)
  modified_base (1)..(3): LNA nucleoside
  modified_base (13)..(16): LNA nucleoside
ctaaagaatagaagaa

SEQ ID NO: 2953 - DNA, 16 bp, Artificial Sequence
  oligonucleotide - internucleotide bonds are phosphorothioate bonds (PS)
  modified_base (1)..(4): LNA nucleoside
  modified_base (13)..(16): LNA nucleoside
ctaaagaatagaagaa

SEQ ID NO: 2954 - DNA, 14 bp, Artificial Sequence
  oligonucleotide - internucleotide bonds are phosphorothioate bonds (PS)
  modified_base (1)..(2): LNA nucleoside
  modified_base (13)..(14): LNA nucleoside
tggcacccttgcaa

SEQ ID NO: 2955 - DNA, 14 bp, Artificial Sequence
  oligonucleotide - internucleotide bonds are phosphorothioate bonds (PS)
  modified_base (1)..(2): LNA nucleoside
  modified_base (12)..(14): LNA nucleoside
tggcacccttgcaa

SEQ ID NO: 2956 - DNA, 14 bp, Artificial Sequence
  oligonucleotide - internucleotide bonds are phosphorothioate bonds (PS)
  modified_base (1)..(2): LNA nucleoside
  modified_base (11)..(14): LNA nucleoside
tggcacccttgcaa

SEQ ID NO: 2957 - DNA, 15 bp, Artificial Sequence
  oligonucleotide - internucleotide bonds are phosphorothioate bonds (PS)
  modified_base (1)..(3): LNA nucleoside
  modified_base (13)..(15): LNA nucleoside
aggataatgcagcaa

SEQ ID NO: 2958 - DNA, 15 bp, Artificial Sequence
  oligonucleotide - internucleotide bonds are phosphorothioate bonds (PS)
  modified_base (1)..(3): LNA nucleoside
  modified_base (12)..(15): LNA nucleoside
aggataatgcagcaa

SEQ ID NO: 2959 - DNA, 15 bp, Artificial Sequence
  oligonucleotide - internucleotide bonds are phosphorothioate bonds (PS)
  modified_base (1)..(4): LNA nucleoside
  modified_base (12)..(15): LNA nucleoside
aggataatgcagcaa

SEQ ID NO: 2960 - DNA, 16 bp, Artificial Sequence
  oligonucleotide - internucleotide bonds are phosphorothioate bonds (PS)
  modified_base (1)..(4): LNA nucleoside
  modified_base (15)..(16): LNA nucleoside
taggataatgcagcaa

SEQ ID NO: 2961 - DNA, 16 bp, Artificial Sequence
  oligonucleotide - internucleotide bonds are phosphorothioate bonds (PS)
  modified_base (1)..(4): LNA nucleoside
  modified_base (14)..(16): LNA nucleoside
taggataatgcagcaa

SEQ ID NO: 2962 - DNA, 16 bp, Artificial Sequence
  oligonucleotide - internucleotide bonds are phosphorothioate bonds (PS)
  modified_base (1)..(4): LNA nucleoside
  modified_base (13)..(16): LNA nucleoside
taggataatgcagcaa

SEQ ID NO: 2963 - DNA, 17 bp, Artificial Sequence
  oligonucleotide - internucleotide bonds are phosphorothioate bonds (PS)
  modified_base (1)..(4): LNA nucleoside
  modified_base (16)..(17): LNA nucleoside
ataggataatgcagcaa

SEQ ID NO: 2964 - DNA, 17 bp, Artificial Sequence
  oligonucleotide - internucleotide bonds are phosphorothioate bonds (PS)
  modified_base (1)..(4): LNA nucleoside
  modified_base (15)..(17): LNA nucleoside
ataggataatgcagcaa

SEQ ID NO: 2965 - DNA, 17 bp, Artificial Sequence
  oligonucleotide - internucleotide bonds are phosphorothioate bonds (PS)
  modified_base (1)..(4): LNA nucleoside
  modified_base (14)..(17): LNA nucleoside
ataggataatgcagcaa

SEQ ID NO: 2966 - DNA, 14 bp, Artificial Sequence
  oligonucleotide - internucleotide bonds are phosphorothioate bonds (PS)
  modified_base (1)..(3): LNA nucleoside
  modified_base (13)..(14): LNA nucleoside
gaggctcagtccaa

SEQ ID NO: 2967 - DNA, 14 bp, Artificial Sequence
  oligonucleotide - internucleotide bonds are phosphorothioate bonds (PS)
  modified_base (1)..(3): LNA nucleoside
  modified_base (12)..(14): LNA nucleoside
gaggctcagtccaa

SEQ ID NO: 2968 - DNA, 14 bp, Artificial Sequence
  oligonucleotide - internucleotide bonds are phosphorothioate bonds (PS)
  modified_base (1)..(3): LNA nucleoside
  modified_base (11)..(14): LNA nucleoside
gaggctcagtccaa

SEQ ID NO: 2969 - DNA, 15 bp, Artificial Sequence
  oligonucleotide - internucleotide bonds are phosphorothioate bonds (PS)
  modified_base (1)..(2): LNA nucleoside
  modified_base (13)..(15): LNA nucleoside
tgaggctcagtccaa

SEQ ID NO: 2970 - DNA, 15 bp, Artificial Sequence
  oligonucleotide - internucleotide bonds are phosphorothioate bonds (PS)
  modified_base (1)..(4): LNA nucleoside
  modified_base (14)..(15): LNA nucleoside
tgaggctcagtccaa

SEQ ID NO: 2971 - DNA, 15 bp, Artificial Sequence
  oligonucleotide - internucleotide bonds are phosphorothioate bonds (PS)
  modified_base (1)..(4): LNA nucleoside
  modified_base (13)..(15): LNA nucleoside
tgaggctcagtccaa

SEQ ID NO: 2972 - DNA, 16 bp, Artificial Sequence
  oligonucleotide - internucleotide bonds are phosphorothioate bonds (PS)
  modified_base (1)..(2): LNA nucleoside
  modified_base (15)..(16): LNA nucleoside
ctgaggctcagtccaa

SEQ ID NO: 2973 - DNA, 16 bp, Artificial Sequence
  oligonucleotide - internucleotide bonds are phosphorothioate bonds (PS)
  modified_base (1)..(2): LNA nucleoside
  modified_base (14)..(16): LNA nucleoside
ctgaggctcagtccaa

SEQ ID NO: 2974 - DNA, 16 bp, Artificial Sequence
  oligonucleotide - internucleotide bonds are phosphorothioate bonds (PS)
  modified_base (1)..(4): LNA nucleoside
  modified_base (15)..(16): LNA nucleoside
ctgaggctcagtccaa

SEQ ID NO: 2975 - DNA, 15 bp, Artificial Sequence
  oligonucleotide - internucleotide bonds are phosphorothioate bonds (PS)
  modified_base (1)..(2): LNA nucleoside
  modified_base (12)..(15): LNA nucleoside
aaaagaggaacccaa

SEQ ID NO: 2976 - DNA, 15 bp, Artificial Sequence
  oligonucleotide - internucleotide bonds are phosphorothioate bonds (PS)
  modified_base (1)..(3): LNA nucleoside
  modified_base (12)..(15): LNA nucleoside
aaaagaggaacccaa

SEQ ID NO: 2977 - DNA, 15 bp, Artificial Sequence
  oligonucleotide - internucleotide bonds are phosphorothioate bonds (PS)
  modified_base (1)..(4): LNA nucleoside
  modified_base (12)..(15): LNA nucleoside
aaaagaggaacccaa

SEQ ID NO: 2978 - DNA, 16 bp, Artificial Sequence
  oligonucleotide - internucleotide bonds are phosphorothioate bonds (PS)
  modified_base (1)..(2): LNA nucleoside
  modified_base (13)..(16): LNA nucleoside
aaaaagaggaacccaa

SEQ ID NO: 2979 - DNA, 16 bp, Artificial Sequence
  oligonucleotide - internucleotide bonds are phosphorothioate bonds (PS)
  modified_base (1)..(3): LNA nucleoside
  modified_base (13)..(16): LNA nucleoside
aaaaagaggaacccaa

SEQ ID NO: 2980 - DNA, 16 bp, Artificial Sequence
  oligonucleotide - internucleotide bonds are phosphorothioate bonds (PS)
  modified_base (1)..(4): LNA nucleoside
  modified_base (13)..(16): LNA nucleoside
aaaaagaggaacccaa

SEQ ID NO: 2981 - DNA, 17 bp, Artificial Sequence
  oligonucleotide - internucleotide bonds are phosphorothioate bonds (PS)
  modified_base (1)..(2): LNA nucleoside
  modified_base (14)..(17): LNA nucleoside
taaaaagaggaacccaa

SEQ ID NO: 2982 - DNA, 17 bp, Artificial Sequence
  oligonucleotide - internucleotide bonds are phosphorothioate bonds (PS)
  modified_base (1)..(3): LNA nucleoside
  modified_base (14)..(17): LNA nucleoside
taaaaagaggaacccaa

SEQ ID NO: 2983 - DNA, 17 bp, Artificial Sequence
  oligonucleotide - internucleotide bonds are phosphorothioate bonds (PS)
  modified_base (1)..(4): LNA nucleoside
  modified_base (14)..(17): LNA nucleoside
taaaaagaggaacccaa

SEQ ID NO: 2984 - DNA, 15 bp, Artificial Sequence
  oligonucleotide - internucleotide bonds are phosphorothioate bonds (PS)
  modified_base (1)..(3): LNA nucleoside
  modified_base (12)..(15): LNA nucleoside
attttccttgtacaa

SEQ ID NO: 2985 - DNA, 15 bp, Artificial Sequence
  oligonucleotide - internucleotide bonds are phosphorothioate bonds (PS)
  modified_base (1)..(4): LNA nucleoside
  modified_base (13)..(15): LNA nucleoside
attttccttgtacaa

SEQ ID NO: 2986 - DNA, 15 bp, Artificial Sequence
  oligonucleotide - internucleotide bonds are phosphorothioate bonds (PS)
  modified_base (1)..(4): LNA nucleoside
  modified_base (12)..(15): LNA nucleoside
attttccttgtacaa

SEQ ID NO: 2987 - DNA, 16 bp, Artificial Sequence
  oligonucleotide - internucleotide bonds are phosphorothioate bonds (PS)
  modified_base (1)..(3): LNA nucleoside
  modified_base (13)..(16): LNA nucleoside
aattttccttgtacaa

SEQ ID NO: 2988 - DNA, 16 bp, Artificial Sequence
  oligonucleotide - internucleotide bonds are phosphorothioate bonds (PS)
  modified_base (1)..(4): LNA nucleoside
  modified_base (14)..(16): LNA nucleoside
aattttccttgtacaa

SEQ ID NO: 2989 - DNA, 16 bp, Artificial Sequence
  oligonucleotide - internucleotide bonds are phosphorothioate bonds (PS)
  modified_base (1)..(4): LNA nucleoside
  modified_base (13)..(16): LNA nucleoside
aattttccttgtacaa

SEQ ID NO: 2990 - DNA, 17 bp, Artificial Sequence
  oligonucleotide - internucleotide bonds are phosphorothioate bonds (PS)
  modified_base (1)..(3): LNA nucleoside
  modified_base (14)..(17): LNA nucleoside
taattttccttgtacaa

SEQ ID NO: 2991 - DNA, 17 bp, Artificial Sequence
  oligonucleotide - internucleotide bonds are phosphorothioate bonds (PS)
  modified_base (1)..(4): LNA nucleoside
  modified_base (15)..(17): LNA nucleoside
taattttccttgtacaa

SEQ ID NO: 2992 - DNA, 17 bp, Artificial Sequence
  oligonucleotide - internucleotide bonds are phosphorothioate bonds (PS)
  modified_base (1)..(4): LNA nucleoside
  modified_base (14)..(17): LNA nucleoside
taattttccttgtacaa

SEQ ID NO: 2993 - DNA, 18 bp, Artificial Sequence
  oligonucleotide - internucleotide bonds are phosphorothioate bonds (PS)
  modified_base (1)..(4): LNA nucleoside
  modified_base (17)..(18): LNA nucleoside
ctaattttccttgtacaa

SEQ ID NO: 2994 - DNA, 18 bp, Artificial Sequence
  oligonucleotide - internucleotide bonds are phosphorothioate bonds (PS)
  modified_base (1)..(3): LNA nucleoside
  modified_base (16)..(18): LNA nucleoside
ctaattttccttgtacaa

SEQ ID NO: 2995 - DNA, 18 bp, Artificial Sequence
  oligonucleotide - internucleotide bonds are phosphorothioate bonds (PS)
  modified_base (1)..(4): LNA nucleoside
  modified_base (15)..(18): LNA nucleoside
ctaattttccttgtacaa

SEQ ID NO: 2996 - DNA, 16 bp, Artificial Sequence
  oligonucleotide - internucleotide bonds are phosphorothioate bonds (PS)
  modified_base (1)..(2): LNA nucleoside
  modified_base (13)..(16): LNA nucleoside
taaagaatagaagaaa

SEQ ID NO: 2997 - DNA, 16 bp, Artificial Sequence
  oligonucleotide - internucleotide bonds are phosphorothioate bonds (PS)
  modified_base (1)..(3): LNA nucleoside
  modified_base (13)..(16): LNA nucleoside
taaagaatagaagaaa

SEQ ID NO: 2998 - DNA, 16 bp, Artificial Sequence
  oligonucleotide - internucleotide bonds are phosphorothioate bonds (PS)
  modified_base (1)..(4): LNA nucleoside
  modified_base (13)..(16): LNA nucleoside
taaagaatagaagaaa

SEQ ID NO: 2999 - DNA, 17 bp, Artificial Sequence
  oligonucleotide - internucleotide bonds are phosphorothioate bonds (PS)
  modified_base (1)..(2): LNA nucleoside
  modified_base (14)..(17): LNA nucleoside
ctaaagaatagaagaaa

SEQ ID NO: 3000 - DNA, 17 bp, Artificial Sequence
  oligonucleotide - internucleotide bonds are phosphorothioate bonds (PS)
  modified_base (1)..(3): LNA nucleoside
  modified_base (14)..(17): LNA nucleoside
ctaaagaatagaagaaa

SEQ ID NO: 3001 - DNA, 17 bp, Artificial Sequence
  oligonucleotide - internucleotide bonds are phosphorothioate bonds (PS)
  modified_base (1)..(4): LNA nucleoside
  modified_base (14)..(17): LNA nucleoside
ctaaagaatagaagaaa

SEQ ID NO: 3002 - DNA, 15 bp, Artificial Sequence
  oligonucleotide - internucleotide bonds are phosphorothioate bonds (PS)
  modified_base (1)..(2): LNA nucleoside
  modified_base (14)..(15): LNA nucleoside
gaggctcagtccaaa

SEQ ID NO: 3003 - DNA, 15 bp, Artificial Sequence
  oligonucleotide - internucleotide bonds are phosphorothioate bonds (PS)
  modified_base (1)..(2): LNA nucleoside
  modified_base (12)..(15): LNA nucleoside
gaggctcagtccaaa

SEQ ID NO: 3004 - DNA, 15 bp, Artificial Sequence
  oligonucleotide - internucleotide bonds are phosphorothioate bonds (PS)
  modified_base (1)..(4): LNA nucleoside
  modified_base (12)..(15): LNA nucleoside
gaggctcagtccaaa

SEQ ID NO: 3005 - DNA, 16 bp, Artificial Sequence
  oligonucleotide - internucleotide bonds are phosphorothioate bonds (PS)
  modified_base (1)..(2): LNA nucleoside
  modified_base (15)..(16): LNA nucleoside
tgaggctcagtccaaa

SEQ ID NO: 3006 - DNA, 16 bp, Artificial Sequence
  oligonucleotide - internucleotide bonds are phosphorothioate bonds (PS)
  modified_base (1)..(3): LNA nucleoside
  modified_base (15)..(16): LNA nucleoside
tgaggctcagtccaaa

SEQ ID NO: 3007 - DNA, 16 bp, Artificial Sequence
  oligonucleotide - internucleotide bonds are phosphorothioate bonds (PS)
  modified_base (1)..(3): LNA nucleoside
  modified_base (13)..(16): LNA nucleoside
tgaggctcagtccaaa

SEQ ID NO: 3008 - DNA, 17 bp, Artificial Sequence
  oligonucleotide - internucleotide bonds are phosphorothioate bonds (PS)
  modified_base (1)..(2): LNA nucleoside
  modified_base (16)..(17): LNA nucleoside
ctgaggctcagtccaaa

SEQ ID NO: 3009 - DNA, 17 bp, Artificial Sequence
  oligonucleotide - internucleotide bonds are phosphorothioate bonds (PS)
  modified_base (1)..(3): LNA nucleoside
  modified_base (15)..(17): LNA nucleoside
ctgaggctcagtccaaa

SEQ ID NO: 3010 - DNA, 17 bp, Artificial Sequence
  oligonucleotide - internucleotide bonds are phosphorothioate bonds (PS)
  modified_base (1)..(4): LNA nucleoside
  modified_base (16)..(17): LNA nucleoside
ctgaggctcagtccaaa

SEQ ID NO: 3011 - DNA, 15 bp, Artificial Sequence
  oligonucleotide - internucleotide bonds are phosphorothioate bonds (PS)
  modified_base (1)..(4): LNA nucleoside
  modified_base (13)..(15): LNA nucleoside
aaagaggaacccaaa

SEQ ID NO: 3012 - DNA, 15 bp, Artificial Sequence
  oligonucleotide - internucleotide bonds are phosphorothioate bonds (PS)
  modified_base (1)..(3): LNA nucleoside
  modified_base (12)..(15): LNA nucleoside
aaagaggaacccaaa

SEQ ID NO: 3013 - DNA, 15 bp, Artificial Sequence
  oligonucleotide - internucleotide bonds are phosphorothioate bonds (PS)
  modified_base (1)..(4): LNA nucleoside
  modified_base (12)..(15): LNA nucleoside
aaagaggaacccaaa

SEQ ID NO: 3014 - DNA, 16 bp, Artificial Sequence
  oligonucleotide - internucleotide bonds are phosphorothioate bonds (PS)
  modified_base (1)..(2): LNA nucleoside
  modified_base (13)..(16): LNA nucleoside
aaaagaggaacccaaa

SEQ ID NO: 3015 - DNA, 16 bp, Artificial Sequence
  oligonucleotide - internucleotide bonds are phosphorothioate bonds (PS)
  modified_base (1)..(3): LNA nucleoside
  modified_base (13)..(16): LNA nucleoside
aaaagaggaacccaaa

SEQ ID NO: 3016 - DNA, 16 bp, Artificial Sequence
  oligonucleotide - internucleotide bonds are phosphorothioate bonds (PS)
  modified_base (1)..(4): LNA nucleoside
  modified_base (13)..(16): LNA nucleoside
aaaagaggaacccaaa

SEQ ID NO: 3017 - DNA, 17 bp, Artificial Sequence
  oligonucleotide - internucleotide bonds are phosphorothioate bonds (PS)
  modified_base (1)..(2): LNA nucleoside
  modified_base (14)..(17): LNA nucleoside
aaaaagaggaacccaaa

SEQ ID NO: 3018 - DNA, 17 bp, Artificial Sequence
  oligonucleotide - internucleotide bonds are phosphorothioate bonds (PS)
  modified_base (1)..(3): LNA nucleoside
  modified_base (14)..(17): LNA nucleoside
aaaaagaggaacccaaa

SEQ ID NO: 3019 - DNA, 17 bp, Artificial Sequence
  oligonucleotide - internucleotide bonds are phosphorothioate bonds (PS)
  modified_base (1)..(4): LNA nucleoside
  modified_base (14)..(17): LNA nucleoside
aaaaagaggaacccaaa

SEQ ID NO: 3020 - DNA, 18 bp, Artificial Sequence
  oligonucleotide - internucleotide bonds are phosphorothioate bonds (PS)
  modified_base (1)..(2): LNA nucleoside
  modified_base (15)..(18): LNA nucleoside
taaaaagaggaacccaaa

SEQ ID NO: 3021 - DNA, 18 bp, Artificial Sequence
  oligonucleotide - internucleotide bonds are phosphorothioate bonds (PS)
  modified_base (1)..(3): LNA nucleoside
  modified_base (15)..(18): LNA nucleoside
taaaaagaggaacccaaa

SEQ ID NO: 3022 - DNA, 18 bp, Artificial Sequence
  oligonucleotide - internucleotide bonds are phosphorothioate bonds (PS)
  modified_base (1)..(4): LNA nucleoside
  modified_base (15)..(18): LNA nucleoside
taaaaagaggaacccaaa

SEQ ID NO: 3023 - DNA, 17 bp, Artificial Sequence
  oligonucleotide - internucleotide bonds are phosphorothioate bonds (PS)
  modified_base (1)..(3): LNA nucleoside
  modified_base (14)..(17): LNA nucleoside
taaagaatagaagaaaa

SEQ ID NO: 3024 - DNA, 17 bp, Artificial Sequence
  oligonucleotide - internucleotide bonds are phosphorothioate bonds (PS)
  modified_base (1)..(4): LNA nucleoside
  modified_base (15)..(17): LNA nucleoside
taaagaatagaagaaaa

SEQ ID NO: 3025 - DNA, 17 bp, Artificial Sequence
  oligonucleotide - internucleotide bonds are phosphorothioate bonds (PS)
  modified_base (1)..(4): LNA nucleoside
  modified_base (14)..(17): LNA nucleoside
taaagaatagaagaaaa

SEQ ID NO: 3026 - DNA, 18 bp, Artificial Sequence
  oligonucleotide - internucleotide bonds are phosphorothioate bonds (PS)
  modified_base (1)..(4): LNA nucleoside
  modified_base (16)..(18): LNA nucleoside
ctaaagaatagaagaaaa

SEQ ID NO: 3027 - DNA, 18 bp, Artificial Sequence
  oligonucleotide - internucleotide bonds are phosphorothioate bonds (PS)
  modified_base (1)..(3): LNA nucleoside
  modified_base (15)..(18): LNA nucleoside
ctaaagaatagaagaaaa

SEQ ID NO: 3028 - DNA, 18 bp, Artificial Sequence
  oligonucleotide - internucleotide bonds are phosphorothioate bonds (PS)
  modified_base (1)..(4): LNA nucleoside
  modified_base (15)..(18): LNA nucleoside
ctaaagaatagaagaaaa

SEQ ID NO: 3029 - DNA, 15 bp, Artificial Sequence
  oligonucleotide - internucleotide bonds are phosphorothioate bonds (PS)
  modified_base (1)..(4): LNA nucleoside
  modified_base (14)..(15): LNA nucleoside
aagaggaacccaaaa

SEQ ID NO: 3030 - DNA, 15 bp, Artificial Sequence
  oligonucleotide - internucleotide bonds are phosphorothioate bonds (PS)
  modified_base (1)..(4): LNA nucleoside
  modified_base (13)..(15): LNA nucleoside
aagaggaacccaaaa

SEQ ID NO: 3031 - DNA, 15 bp, Artificial Sequence
  oligonucleotide - internucleotide bonds are phosphorothioate bonds (PS)
  modified_base (1)..(4): LNA nucleoside
  modified_base (12)..(15): LNA nucleoside
aagaggaacccaaaa

SEQ ID NO: 3032 - DNA, 16 bp, Artificial Sequence
  oligonucleotide - internucleotide bonds are phosphorothioate bonds (PS)
  modified_base (1)..(4): LNA nucleoside
  modified_base (15)..(16): LNA nucleoside
aaagaggaacccaaaa

SEQ ID NO: 3033 - DNA, 16 bp, Artificial Sequence
  oligonucleotide - internucleotide bonds are phosphorothioate bonds (PS)
  modified_base (1)..(4): LNA nucleoside
  modified_base (14)..(16): LNA nucleoside
aaagaggaacccaaaa

SEQ ID NO: 3034 - DNA, 16 bp, Artificial Sequence
  oligonucleotide - internucleotide bonds are phosphorothioate bonds (PS)
  modified_base (1)..(4): LNA nucleoside
  modified_base (13)..(16): LNA nucleoside
aaagaggaacccaaaa

SEQ ID NO: 3035 - DNA, 17 bp, Artificial Sequence
  oligonucleotide - internucleotide bonds are phosphorothioate bonds (PS)
  modified_base (1)..(4): LNA nucleoside
  modified_base (16)..(17): LNA nucleoside
aaaagaggaacccaaaa

SEQ ID NO: 3036 - DNA, 17 bp, Artificial Sequence
  oligonucleotide - internucleotide bonds are phosphorothioate bonds (PS)
  modified_base (1)..(4): LNA nucleoside
  modified_base (15)..(17): LNA nucleoside
aaaagaggaacccaaaa

SEQ ID NO: 3037 - DNA, 17 bp, Artificial Sequence
  oligonucleotide - internucleotide bonds are phosphorothioate bonds (PS)
  modified_base (1)..(4): LNA nucleoside
  modified_base (14)..(17): LNA nucleoside
aaaagaggaacccaaaa

SEQ ID NO: 3038 - DNA, 18 bp, Artificial Sequence
  oligonucleotide - internucleotide bonds are phosphorothioate bonds (PS)
  modified_base (1)..(3): LNA nucleoside
  modified_base (15)..(18): LNA nucleoside
aaaaagaggaacccaaaa

SEQ ID NO: 3039 - DNA, 18 bp, Artificial Sequence
  oligonucleotide - internucleotide bonds are phosphorothioate bonds (PS)
  modified_base (1)..(4): LNA nucleoside
  modified_base (16)..(18): LNA nucleoside
aaaaagaggaacccaaaa

SEQ ID NO: 3040 - DNA, 18 bp, Artificial Sequence
  oligonucleotide - internucleotide bonds are phosphorothioate bonds (PS)
  modified_base (1)..(4): LNA nucleoside
  modified_base (15)..(18): LNA nucleoside
aaaaagaggaacccaaaa

SEQ ID NO: 3041 - DNA, 19 bp, Artificial Sequence
  oligonucleotide - internucleotide bonds are phosphorothioate bonds (PS)
  modified_base (1)..(3): LNA nucleoside
  modified_base (16)..(19): LNA nucleoside
taaaaagaggaacccaaaa

SEQ ID NO: 3042 - DNA, 19 bp, Artificial Sequence
  oligonucleotide - internucleotide bonds are phosphorothioate bonds (PS)
  modified_base (1)..(4): LNA nucleoside
  modified_base (17)..(19): LNA nucleoside
taaaaagaggaacccaaaa

SEQ ID NO: 3043 - DNA, 19 bp, Artificial Sequence
  oligonucleotide - internucleotide bonds are phosphorothioate bonds (PS)
  modified_base (1)..(4): LNA nucleoside
  modified_base (16)..(19): LNA nucleoside
taaaaagaggaacccaaaa

SEQ ID NO: 3044 - RNA, 18 nt, Homo Sapiens
ccacaguaaguaaagcca

SEQ ID NO: 3045 - RNA, 18 nt, Homo Sapiens
aacguauaugaaguggag

SEQ ID NO: 3046 - RNA, 18 nt, Homo Sapiens
caccuacagagauggcuu

SEQ ID NO: 3047 - RNA, 18 nt, Homo Sapiens
auaauuauucuacccagg

SEQ ID NO: 3048 - RNA, 17 nt, Homo Sapiens
caccaagugucgagugc

SEQ ID NO: 3049 - RNA, 18 nt, Homo Sapiens
gggaaguacccauucaua

SEQ ID NO: 3050 - RNA, 18 nt, Homo Sapiens
accagcuucuggccauuu

SEQ ID NO: 3051 - RNA, 17 nt, Homo Sapiens
aaagggcacgaugugac

SEQ ID NO: 3052 - RNA, 18 nt, Homo Sapiens
caauaaacacaucugaga

SEQ ID NO: 3053 - DNA, 18 bp, Artificial Sequence
  oligonucleotide - internucleotide bonds are phosphorothioate bonds (PS)
  modified_base (1)..(2): LNA nucleoside
  modified_base (17)..(18): LNA nucleoside
tggctttacttactgtgg

SEQ ID NO: 3054 - DNA, 18 bp, Artificial Sequence
  oligonucleotide - internucleotide bonds are phosphorothioate bonds (PS)
  modified_base (1)..(2): LNA nucleoside
  modified_base (16)..(18): LNA nucleoside
  modified_base (15)..(15): 5-methyl cytosine
ctccacttcatatacgtt

SEQ ID NO: 3055 - DNA, 18 bp, Artificial Sequence
  oligonucleotide - internucleotide bonds are phosphorothioate bonds (PS)
  modified_base (1)..(2): LNA nucleoside
  modified_base (17)..(18): LNA nucleoside
aagccatctctgtaggtg

SEQ ID NO: 3056 - DNA, 18 bp, Artificial Sequence
  oligonucleotide - internucleotide bonds are phosphorothioate bonds (PS)
  modified_base (1)..(2): LNA nucleoside
  modified_base (15)..(18): LNA nucleoside
cctgggtagaataattat

SEQ ID NO: 3057 - DNA, 17 bp, Artificial Sequence
  oligonucleotide - internucleotide bonds are phosphorothioate bonds (PS)
  modified_base (1)..(2): LNA nucleoside
  modified_base (16)..(17): LNA nucleoside
  modified_base (6)..(6): 5-methyl cytosine
gcactcgacacttggtg

SEQ ID NO: 3058 - DNA, 18 bp, Artificial Sequence
  oligonucleotide - internucleotide bonds are phosphorothioate bonds (PS)
  modified_base (1)..(2): LNA nucleoside
  modified_base (17)..(18): LNA nucleoside
tatgaatgggtacttccc

SEQ ID NO: 3059 - DNA, 18 bp, Artificial Sequence
  oligonucleotide - internucleotide bonds are phosphorothioate bonds (PS)
  modified_base (1)..(3): LNA nucleoside
  modified_base (17)..(18): LNA nucleoside
aaatggccagaagctggt

SEQ ID NO: 3060 - DNA, 17 bp, Artificial Sequence
  oligonucleotide - internucleotide bonds are phosphorothioate bonds (PS)
  modified_base (1)..(2): LNA nucleoside
  modified_base (16)..(17): LNA nucleoside
  modified_base (8)..(8): 5-methyl cytosine
gtcacatcgtgcccttt

SEQ ID NO: 3061 - DNA, 18 bp, Artificial Sequence
  oligonucleotide - internucleotide bonds are phosphorothioate bonds (PS)
  modified_base (1)..(3): LNA nucleoside
  modified_base (16)..(18): LNA nucleoside
tctcagatgtgtttattg

SEQ ID NO: 3062 - RNA, 16 nt, Homo Sapiens
gggacguauuggugug

SEQ ID NO: 3063 - RNA, 17 nt, Homo Sapiens
ccugccucuauuacgga

SEQ ID NO: 3064 - RNA, 17 nt, Homo Sapiens
guuucugcgauuauggu

SEQ ID NO: 3065 - RNA, 16 nt, Homo Sapiens
cccuaaacuaugcgug

SEQ ID NO: 3066 - RNA, 16 nt, Homo Sapiens
ggcucuuaucuucggc

SEQ ID NO: 3067 - RNA, 17 nt, Homo Sapiens
acucuauuccguguuac

SEQ ID NO: 3068 - RNA, 18 nt, Homo Sapiens
ggugguuguaauguauaa

SEQ ID NO: 3069 - RNA, 17 nt, Homo Sapiens
caggguuagacuacggu

SEQ ID NO: 3070 - RNA, 16 nt, Homo Sapiens
gcucccucuuaacgca

SEQ ID NO: 3071 - RNA, 18 nt, Homo Sapiens
aguucuaggaugacacaa

SEQ ID NO: 3072 - RNA, 18 nt, Homo Sapiens
ccgacgugaugaaacauu

SEQ ID NO: 3073 - RNA, 18 nt, Homo Sapiens
uuagcucuguauaugggu

SEQ ID NO: 3074 - RNA, 17 nt, Homo Sapiens
guagccauagaaacgug

SEQ ID NO: 3075 - RNA, 17 nt, Homo Sapiens
caccaugucuuugcggg

SEQ ID NO: 3076 - RNA, 17 nt, Homo Sapiens
accgcaauuccaucuac

SEQ ID NO: 3077 - RNA, 17 nt, Homo Sapiens
auaaauccgucccuugg

SEQ ID NO: 3078 - RNA, 17 nt, Homo Sapiens
gccgccuuacccugaac

SEQ ID NO: 3079 - RNA, 17 nt, Homo Sapiens
gcgacuuuacccuucga

SEQ ID NO: 3080 - RNA, 17 nt, Homo Sapiens
cuuguccucguacuauu

SEQ ID NO: 3081 - RNA, 16 nt, Homo Sapiens
acuuccgcuuaccgcu

SEQ ID NO: 3082 - RNA, 16 nt, Homo Sapiens
agcccgucuacuuguc

SEQ ID NO: 3083 - RNA, 17 nt, Homo Sapiens
gcuugacuacugauaac

SEQ ID NO: 3084 - RNA, 17 nt, Homo Sapiens
acaugauaagauacacu

SEQ ID NO: 3085 - RNA, 17 nt, Homo Sapiens
ugaugagauucguccau

SEQ ID NO: 3086 - RNA, 17 nt, Homo Sapiens
gcaauuccgacuauuag

SEQ ID NO: 3087 - RNA, 17 nt, Homo Sapiens
cgucccuacuguuauua

SEQ ID NO: 3088 - RNA, 17 nt, Homo Sapiens
cacaaguacgaaacaua

SEQ ID NO: 3089 - RNA, 16 nt, Homo Sapiens
gguaacugaaccgcuu

SEQ ID NO: 3090 - RNA, 18 nt, Homo Sapiens
ccuauccuaauacuaucu

SEQ ID NO: 3091 - RNA, 17 nt, Homo Sapiens
agaccuuaugcgaugcu

SEQ ID NO: 3092 - RNA, 18 nt, Homo Sapiens
acuaacuauuuacccuau

SEQ ID NO: 3093 - RNA, 16 nt, Homo Sapiens
uucggcuuacucuaua

SEQ ID NO: 3094 - RNA, 17 nt, Homo Sapiens
ccuauacuguugaccca

SEQ ID NO: 3095 - RNA, 17 nt, Homo Sapiens
cgugaauacuguguaau

SEQ ID NO: 3096 - RNA, 16 nt, Homo Sapiens
cuuagugcggugucgg

SEQ ID NO: 3097 - RNA, 18 nt, Homo Sapiens
ugacgcuuccuuucuuag

SEQ ID NO: 3098 - DNA, 16 bp, Artificial Sequence
  oligonucleotide - internucleotide bonds are phosphorothioate bonds (PS)
  modified_base (1)..(2): LNA nucleoside
  modified_base (15)..(16): LNA nucleoside
  modified_base (11)..(11): 5-methyl cytosine
cacaccaatacgtccc

SEQ ID NO: 3099 - DNA, 17 bp, Artificial Sequence
  oligonucleotide - internucleotide bonds are phosphorothioate bonds (PS)
  modified_base (1)..(2): LNA nucleoside
  modified_base (16)..(17): LNA nucleoside
  modified_base (3)..(3): 5-methyl cytosine
tccgtaatagaggcagg

SEQ ID NO: 3100 - DNA, 17 bp, Artificial Sequence
  oligonucleotide - internucleotide bonds are phosphorothioate bonds (PS)
  modified_base (1)..(4): LNA nucleoside
  modified_base (15)..(17): LNA nucleoside
  modified_base (9)..(9): 5-methyl cytosine
accataatcgcagaaac

SEQ ID NO: 3101 - DNA, 16 bp, Artificial Sequence
  oligonucleotide - internucleotide bonds are phosphorothioate bonds (PS)
  modified_base (1)..(3): LNA nucleoside
  modified_base (15)..(16): LNA nucleoside
cacgcatagtttaggg

SEQ ID NO: 3102 - DNA, 16 bp, Artificial Sequence
  oligonucleotide - internucleotide bonds are phosphorothioate bonds (PS)
  modified_base (1)..(2): LNA nucleoside
  modified_base (15)..(16): LNA nucleoside
  modified_base (3)..(3): 5-methyl cytosine
gccgaagataagagcc

SEQ ID NO: 3103 - DNA, 17 bp, Artificial Sequence
  oligonucleotide - internucleotide bonds are phosphorothioate bonds (PS)
  modified_base (1)..(2): LNA nucleoside
  modified_base (14)..(17): LNA nucleoside
  modified_base (7)..(7): 5-methyl cytosine
gtaacacggaatagagt

SEQ ID NO: 3104 - DNA, 18 bp, Artificial Sequence
  oligonucleotide - internucleotide bonds are phosphorothioate bonds (PS)
  modified_base (1)..(3): LNA nucleoside
  modified_base (15)..(18): LNA nucleoside
ttatacattacaaccacc

SEQ ID NO: 3105 - DNA, 17 bp, Artificial Sequence
  oligonucleotide - internucleotide bonds are phosphorothioate bonds (PS)
  modified_base (1)..(2): LNA nucleoside
  modified_base (16)..(17): LNA nucleoside
  modified_base (3)..(3): 5-methyl cytosine
accgtagtctaaccctg

SEQ ID NO: 3106 - DNA, 16 bp, Artificial Sequence
  oligonucleotide - internucleotide bonds are phosphorothioate bonds (PS)
  modified_base (1)..(2): LNA nucleoside
  modified_base (15)..(16): LNA nucleoside
  modified_base (3)..(3): 5-methyl cytosine
tgcgttaagagggagc

SEQ ID NO: 3107 - DNA, 18 bp, Artificial Sequence
  oligonucleotide - internucleotide bonds are phosphorothioate bonds (PS)
  modified_base (1)..(2): LNA nucleoside
  modified_base (17)..(18): LNA nucleoside
ttgtgtcatcctagaact

SEQ ID NO: 3108 - DNA, 18 bp, Artificial Sequence
  oligonucleotide - internucleotide bonds are phosphorothioate bonds (PS)
  modified_base (1)..(3): LNA nucleoside
  modified_base (17)..(18): LNA nucleoside
  modified_base (13)..(13): 5-methyl cytosine
  modified_base (16)..(16): 5-methyl cytosine
aatgtttcatcacgtcgg

SEQ ID NO: 3109 - DNA, 18 bp, Artificial Sequence
  oligonucleotide - internucleotide bonds are phosphorothioate bonds (PS)
  modified_base (1)..(3): LNA nucleoside
  modified_base (16)..(18): LNA nucleoside
acccatatacagagctaa

SEQ ID NO: 3110 - DNA, 17 bp, Artificial Sequence
  oligonucleotide - internucleotide bonds are phosphorothioate bonds (PS)
  modified_base (1)..(4): LNA nucleoside
  modified_base (16)..(17): LNA nucleoside
cacgtttctatggctac

SEQ ID NO: 3111 - DNA, 17 bp, Artificial Sequence
  oligonucleotide - internucleotide bonds are phosphorothioate bonds (PS)
  modified_base (1)..(3): LNA nucleoside
  modified_base (16)..(17): LNA nucleoside
cccgcaaagacatggtg

SEQ ID NO: 3112 - DNA, 17 bp, Artificial Sequence
  oligonucleotide - internucleotide bonds are phosphorothioate bonds (PS)
  modified_base (1)..(2): LNA nucleoside
  modified_base (15)..(17): LNA nucleoside
  modified_base (14)..(14): 5-methyl cytosine
gtagatggaattgcggt

SEQ ID NO: 3113 - DNA, 17 bp, Artificial Sequence
  oligonucleotide - internucleotide bonds are phosphorothioate bonds (PS)
  modified_base (1)..(2): LNA nucleoside
  modified_base (15)..(17): LNA nucleoside
  modified_base (9)..(9): 5-methyl cytosine
ccaagggacggatttat

SEQ ID NO: 3114 - DNA, 17 bp, Artificial Sequence
  oligonucleotide - internucleotide bonds are phosphorothioate bonds (PS)
  modified_base (1)..(2): LNA nucleoside
  modified_base (16)..(17): LNA nucleoside
  modified_base (14)..(14): 5-methyl cytosine
gttcagggtaaggcggc

SEQ ID NO: 3115 - DNA, 17 bp, Artificial Sequence
  oligonucleotide - internucleotide bonds are phosphorothioate bonds (PS)
  modified_base (1)..(2): LNA nucleoside
  modified_base (15)..(17): LNA nucleoside
tcgaagggtaaagtcgc

SEQ ID NO: 3116 - DNA, 17 bp, Artificial Sequence
  oligonucleotide - internucleotide bonds are phosphorothioate bonds (PS)
  modified_base (1)..(4): LNA nucleoside
  modified_base (14)..(17): LNA nucleoside
  modified_base (8)..(8): 5-methyl cytosine
aatagtacgaggacaag

SEQ ID NO: 3117 - DNA, 16 bp, Artificial Sequence
  oligonucleotide - internucleotide bonds are phosphorothioate bonds (PS)
  modified_base (1)..(2): LNA nucleoside
  modified_base (14)..(16): LNA nucleoside
  modified_base (3)..(3): 5-methyl cytosine
  modified_base (10)..(10): 5-methyl cytosine
agcggtaagcggaagt

SEQ ID NO: 3118 - DNA, 16 bp, Artificial Sequence
  oligonucleotide - internucleotide bonds are phosphorothioate bonds (PS)
  modified_base (1)..(3): LNA nucleoside
  modified_base (15)..(16): LNA nucleoside
  modified_base (11)..(11): 5-methyl cytosine
gacaagtagacgggct

SEQ ID NO: 3119 - DNA, 17 bp, Artificial Sequence
  oligonucleotide - internucleotide bonds are phosphorothioate bonds (PS)
  modified_base (1)..(2): LNA nucleoside
  modified_base (15)..(17): LNA nucleoside
gttatcagtagtcaagc

SEQ ID NO: 3120 - DNA, 17 bp, Artificial Sequence
  oligonucleotide - internucleotide bonds are phosphorothioate bonds (PS)
  modified_base (1)..(3): LNA nucleoside
  modified_base (15)..(17): LNA nucleoside
agtgtatcttatcatgt

SEQ ID NO: 3121 - DNA, 17 bp, Artificial Sequence
  oligonucleotide - internucleotide bonds are phosphorothioate bonds (PS)
  modified_base (1)..(3): LNA nucleoside
  modified_base (16)..(17): LNA nucleoside
  modified_base (6)..(6): 5-methyl cytosine
atggacgaatctcatca

SEQ ID NO: 3122 - DNA, 17 bp, Artificial Sequence
  oligonucleotide - internucleotide bonds are phosphorothioate bonds (PS)
  modified_base (1)..(2): LNA nucleoside
  modified_base (15)..(17): LNA nucleoside
  modified_base (9)..(9): 5-methyl cytosine
ctaatagtcggaattgc

SEQ ID NO: 3123 - DNA, 17 bp, Artificial Sequence
  oligonucleotide - internucleotide bonds are phosphorothioate bonds (PS)
  modified_base (1)..(4): LNA nucleoside
  modified_base (14)..(17): LNA nucleoside
taataacagtagggacg

SEQ ID NO: 3124 - DNA, 17 bp, Artificial Sequence
  oligonucleotide - internucleotide bonds are phosphorothioate bonds (PS)
  modified_base (1)..(2): LNA nucleoside
  modified_base (15)..(17): LNA nucleoside
  modified_base (8)..(8): 5-methyl cytosine
tatgtttcgtacttgtg

SEQ ID NO: 3125 - DNA, 16 bp, Artificial Sequence
  oligonucleotide - internucleotide bonds are phosphorothioate bonds (PS)
  modified_base (1)..(2): LNA nucleoside
  modified_base (14)..(16): LNA nucleoside
  modified_base (4)..(4): 5-methyl cytosine
aagcggttcagttacc

SEQ ID NO: 3126 - DNA, 18 bp, Artificial Sequence
  oligonucleotide - internucleotide bonds are phosphorothioate bonds (PS)
  modified_base (1)..(4): LNA nucleoside
  modified_base (16)..(18): LNA nucleoside
agatagtattaggatagg

SEQ ID NO: 3127 - DNA, 17 bp, Artificial Sequence
  oligonucleotide - internucleotide bonds are phosphorothioate bonds (PS)
  modified_base (1)..(2): LNA nucleoside
  modified_base (16)..(17): LNA nucleoside
  modified_base (6)..(6): 5-methyl cytosine
agcatcgcataaggtct

SEQ ID NO: 3128 - DNA, 18 bp, Artificial Sequence
  oligonucleotide - internucleotide bonds are phosphorothioate bonds (PS)
  modified_base (1)..(2): LNA nucleoside
  modified_base (15)..(18): LNA nucleoside
atagggtaaatagttagt

SEQ ID NO: 3129 - DNA, 16 bp, Artificial Sequence
  oligonucleotide - internucleotide bonds are phosphorothioate bonds (PS)
  modified_base (1)..(3): LNA nucleoside
  modified_base (13)..(16): LNA nucleoside
tatagagtaagccgaa

SEQ ID NO: 3130 - DNA, 17 bp, Artificial Sequence
  oligonucleotide - internucleotide bonds are phosphorothioate bonds (PS)
  modified_base (1)..(2): LNA nucleoside
  modified_base (16)..(17): LNA nucleoside
tgggtcaacagtatagg

SEQ ID NO: 3131 - DNA, 17 bp, Artificial Sequence
  oligonucleotide - internucleotide bonds are phosphorothioate bonds (PS)
  modified_base (1)..(4): LNA nucleoside
  modified_base (16)..(17): LNA nucleoside
attacacagtattcacg

SEQ ID NO: 3132 - DNA, 16 bp, Artificial Sequence
  oligonucleotide - internucleotide bonds are phosphorothioate bonds (PS)
  modified_base (1)..(2): LNA nucleoside
  modified_base (15)..(16): LNA nucleoside
  modified_base (8)..(8): 5-methyl cytosine
ccgacaccgcactaag

SEQ ID NO: 3133 - DNA, 18 bp, Artificial Sequence
  oligonucleotide - internucleotide bonds are phosphorothioate bonds (PS)
  modified_base (1)..(4): LNA nucleoside
  modified_base (17)..(18): LNA nucleoside
  modified_base (14)..(14): 5-methyl cytosine
ctaagaaaggaagcgtca

1. An antisense oligonucleotide consisting of a sequence of 14-22 nucleobases in length that is a gapmer comprising a central region of 6 to 16 consecutive DNA nucleotides flanked in each end by wing regions each comprising 1 to 5 nucleotide analogues, wherein the antisense oligonucleotide is complementary to an mRNA encoding an immune checkpoint protein.

2-57. (canceled)

58. The antisense oligonucleotide according to claim 1, wherein said antisense oligonucleotide comprises 1 to 21 phosphorothioate internucleotide linkages.

59. The antisense oligonucleotide according to claim 1, wherein the immune checkpoint protein is anyone selected from CD274, PDCD1LG2, CD80, CD86, CD276, VTCN1, TNFRSF14, LGALS9, IDO1, HMOX1, PDCD1, CTLA4, LAG3, HAVCR2, TDO2, TIGIT, VSIR, CEACAM1, NT5E, KIR2DL1, or KIR2DL3.

60. The antisense oligonucleotide according to claim 1, wherein said oligonucleotide hybridizes to at least one mRNA selected from the group consisting of an mRNA encoding CD274, an mRNA encoding PDCD1LG2, an mRNA encoding CD80, an mRNA encoding CD86, an mRNA encoding CD276, an mRNA encoding VTCN1, an mRNA encoding TNFRSF14, an mRNA encoding LGALS9, an mRNA encoding IDO1, mRNA encoding HMOX1, an mRNA encoding PDCD1, an mRNA encoding CTLA4, an mRNA encoding LAG3, an mRNA encoding HAVCR2, an mRNA encoding TDO2, an mRNA encoding TIGIT, an mRNA encoding VSIR, an mRNA encoding CEACAM1, an mRNA encoding NTSE, an mRNA encoding KIR2DL1, and an mRNA encoding KIR2DL3.

61. The antisense oligonucleotide according to claim 1, wherein said oligonucleotide hybridizes to at least two mRNAs selected from the group consisting of an mRNA encoding CD274, an mRNA encoding PDCD1LG2, an mRNA encoding CD80, an mRNA encoding CD86, an mRNA encoding CD276, an mRNA encoding VTCN1, an mRNA encoding TNFRSF14, an mRNA encoding LGALS9, an mRNA encoding IDO1, mRNA encoding HMOX1, an mRNA encoding PDCD1, an mRNA encoding CTLA4, an mRNA encoding LAG3, an mRNA encoding HAVCR2, an mRNA encoding TDO2, an mRNA encoding TIGIT, an mRNA encoding VSIR, an mRNA encoding CEACAM1, an mRNA encoding NT5E, an mRNA encoding KIR2DL1, and an mRNA encoding KIR2DL3.

62. The antisense oligonucleotide according to claim 1, wherein said oligonucleotide hybridizes to a region of at least three mRNAs selected from the group consisting of an mRNA encoding CD274, an mRNA encoding PDCD1LG2, an mRNA encoding CD80, an mRNA encoding CD86, an mRNA encoding CD276, an mRNA encoding VTCN1, an mRNA encoding TNFRSF14, an mRNA encoding LGALS9, an mRNA encoding IDO1, mRNA encoding HMOX1, an mRNA encoding PDCD1, an mRNA encoding CTLA4, an mRNA encoding LAG3, an mRNA encoding HAVCR2, an mRNA encoding TDO2, an mRNA encoding TIGIT, an mRNA encoding VSIR, an mRNA encoding CEACAM1, an mRNA encoding NT5E, an mRNA encoding KIR2DL1, and an mRNA encoding KIR2DL3.

63. The antisense oligonucleotide according to claim 1, wherein the antisense oligonucleotide reduces expression of at least two immune checkpoint proteins selected from CD274, PDCD1LG2, CD80, CD86, CD276, VTCN1, TNFRSF14, LGALS9, IDO1, HMOX1, PDCD1, CTLA4, LAG3, HAVCR2, TDO2, TIGIT, VSIR, CEACAM1, NT5E, KIR2DL1, or KIR2DL3.

64. The antisense oligonucleotide according to claim 1, wherein the antisense oligonucleotide reduces expression of three immune checkpoint proteins selected from CD274, PDCD1LG2, CD80, CD86, CD276, VTCN1, TNFRSF14, LGALS9, IDO1, HMOX1, PDCD1, CTLA4, LAG3, HAVCR2, TDO2, TIGIT, VSIR, CEACAM1, NT5E, KIR2DL1, or KIR2DL3.

65. The antisense oligonucleotide according to claim 1, wherein the antisense oligonucleotide is complementary to anyone of SEQ ID NOs: 1-375, or to anyone of SEQ ID NOs: 1473-1503, or to anyone of SEQ ID NOs: 1535-1593 or to SEQ ID NO: 1654 or to anyone of SEQ ID NOs: 1655-2001, or to anyone of SEQ ID NOs: 3044-3052, or to anyone of SEQ ID NOs: 3062-3097.

66. The antisense oligonucleotide according to claim 1, wherein at least one of the wing regions comprises at least one nucleoside analogue selected from beta-D-oxy LNA, alpha-L-oxy-LNA, beta-D-amino-LNA, alpha-L-amino-LNA, beta-D-thio-LNA, alpha-L-thio-LNA, 5′-methyl-LNA, beta-D-ENA alpha-L-ENA, tricyclo-DNA, 2′-fluoro, 2′-O-methyl, 2′-methoxyethyl (2′-MOE), 2′cyclic ethyl (cET), or Conformationally Restricted Nucleoside (CRN).

67. The antisense oligonucleotide according to claim 1, wherein at least one of the wing regions comprises two or more nucleoside analogues, wherein said nucleotide analogues is a mixture of LNA and at least one nucleoside analogue independently selected from the group consisting of tricyclo-DNA, 2′-fluoro, 2′-O-methyl, 2′-methoxyethyl (2′-MOE), 2′cyclic ethyl (cET), and Conformationally Restricted Nucleoside (CRN).

68. The antisense oligonucleotide according to claim 1, wherein at least one of the wing regions comprises a mixture of two or more nucleoside analogues selected from LNA or 2′-fluoro.

69. The antisense oligonucleotide according to claim 1, wherein the antisense oligonucleotide is any one of SEQ ID NOs: 376-1472, or anyone of SEQ ID NOs: 1504-1534, or anyone of SEQ ID NOs: 1594-1653, or anyone of SEQ ID NOs: 2002-3043, or anyone of SEQ ID NOs: 3053-3061, or anyone of SEQ ID NOs: 3098-3133.

70. The antisense oligonucleotide according to claim 1, wherein the antisense oligonucleotide is conjugated with a ligand.

71. The antisense oligonucleotide according to claim 1, wherein the antisense oligonucleotide is conjugated with folic acid or N-acetylgalactosamine (GalNAc).

72. The antisense oligonucleotide according to claim 1, wherein the antisense oligonucleotide is unconjugated.

73. A pharmaceutical composition comprising 1, 2, 3, 4, 5, 6, 7, 8, 9 or 10 antisense oligonucleotides according to claim 1, wherein the antisense oligonucleotides are selected so that the composition targets at least two immune checkpoint proteins.

74. A method inducing tumor regression in a human, comprising administration of a therapeutically effective dose of the antisense oligonucleotide according to claim 1 to a human.

75. The method of claim 74, comprising:
a. Isolating tumor-specific T-cells from a cancer patient;
b. Expanding the T-cells ex vivo;
c. Modifying the T-cells by reducing expression of one or more of immune checkpoint proteins selected from CTLA4, PDCD1, LAG3, HAVCR2, TIGIT, or CEACAM1 in the T-cells by providing one or more of the antisense oligonucleotides of claim 1; and
d. Administering the modified T-cells to the cancer patient.

76. The method of claim 74, comprising:
a. Isolating dendritic cells from a cancer patient;
b. Testing the dendritic cells for expression of an immune checkpoint protein selected from CD274, PDCD1LG2, CD80, CD86, CD276, VTCN1, TNFRSF14, LGALS9, IDO1, HMOX1, TDO2, VSIR, or NT5E;
c. Expanding the dendritic cells ex vivo;
d. Modifying the dendritic cells by reducing expression of one or more of the immune checkpoint proteins for which the dendritic cells tested positive by providing one or more of the antisense oligonucleotides of claim 1; and
e. Administering the modified dendritic cells to the cancer patient.

77. The method of claim 74, comprising:
a. Isolating T-cells from a cancer patient;
b. Expanding the T-cells ex vivo;
c. Co-culturing the T-cells with modified dendritic cells or non-modified dendritic cells or other antigen presenting cells;
d. Modifying the T-cells by reducing expression of one or more of immune checkpoint proteins selected from CTLA4, PDCD1, LAG3, HAVCR2, TIGIT, or CEACAM1 in the T-cells by providing one or more of the antisense oligonucleotides of claim 1; and
e. Administering the modified T-cells to the cancer patient.

78. The method of claim 74, comprising:
a. Isolating NK cells from a cancer patient;
b. Expanding the NK cells ex vivo;
c. Testing the NK cells for expression of an immune checkpoint protein selected from KIR2DL1 or KIR2DL3;
d. Modifying the NK cells by reducing expression of one or more of the immune checkpoint proteins for which the NK cells tested positive by providing one or more of the antisense oligonucleotides of claim 1 to the NK cells; and
e. Administering the modified NK cells to the cancer patient.
